(19) United States
(12) Patent Application Publication
(10) Pub. No.: US 2026/0137732 A1
(43) Pub. Date: May 21, 2026

(54) AKKERMANSIA MUCINIPHILA FOR INCREASING GLUCAGON-LIKE PEPTIDE-1, EXTRACT AND METHOD THEREOF

(71) Applicant: Leeuwenhoek Laboratories Co. Ltd., Taipei City (TW)

(72) Inventors: Chiao-Wei LIN, Taipei City (TW); Yi-Ling LO, Taipei City (TW); Hsin-Bai ZOU, Taipei City (TW); Wen-Hui LIN, Taipei City (TW); Chi-Shan LI, Taipei City (TW); Cheng-Chih HSU, Taipei City (TW)

(21) Appl. No.: 19/392,183

(22) Filed: Nov. 18, 2025

Related U.S. Application Data
(60) Provisional application No. 63/721,573, filed on Nov. 18, 2024.
(60) Provisional application No. 63/738,839, filed on Dec. 26, 2024.

(51) Int. Cl. A61K 35/741; A61K 35/00; C12N 1/205; C12R 1/01

(52) U.S. Cl. CPC A61K 35/741; C12N 1/205; A61K 2035/115; C12R 2001/01

(57) ABSTRACT

Provided is an Akkermansia muciniphila strain including Akkermansia muciniphila LWHK0001, LWHK0002, LWHK0004, LWHK0005, LWHK0006, or LWHK0008. Also provided is a method of Akkermansia muciniphila for increasing glucagon-like peptide-1, including LWHK0001, LWHK0002, LWHK0003, LWHK0004, LWHK0005, LWHK0006, or LWHK0008. Also provided is an Akkermansia muciniphila extract having the effect of increasing glucagon-like peptide-1.

### CROSS-REFERENCE TO RELATED APPLICATION

[0001] This application claims priority to U.S. Provisional Application Ser. No. 63/721,573, filed on Nov. 18, 2024, and U.S. Provisional Application Ser. No. 63/738,839, filed on Dec. 26, 2024 and, which are herein incorporated by reference in its entirety.

[0002] The Sequence Listing associated with this application is filed in electronic format via EFS-Web and is hereby incorporated by reference into the specification in its entirety. The name of the XML file containing the Sequence Listing is NP-38942-US_SEQ_LIST.xml. The size of the XML file is 20,462,521 bytes, and the XML file was created on Nov. 17, 2025.

### BACKGROUND

### Field of Invention

[0003] The present invention relates to Akkermansia muciniphila, extract and method thereof. More particularly, the present invention relates to Akkermansia muciniphila for increasing glucagon-like peptide-1, fractions, extract and method thereof.

### Description of Related Art

[0004] Since 1975, the global prevalence of obesity has almost tripled, primarily because of unhealthy eating habits. Since obesity is associated with increased susceptibility to various chronic diseases, the growing prevalence of overweight has become a significant global public health issue. While a considerable number of weight-loss drugs are available, not all of them are effective for obese subjects. Because of the numerous causes of obesity, some obese subjects may have glucagon-like peptide-1 (GLP-1) deficiency.

[0005] Therefore, how to increase GLP-1, the related art really needs to be improved.

### SUMMARY

[0006] One embodiment of the present disclosure provides an Akkermansia muciniphila selected from the group consisting of: Akkermansia muciniphila LWHK0001 (DSM35271), Akkermansia muciniphila LWHK0002 (DSM35272), Akkermansia muciniphila LWHK0004 (DSM35273), Akkermansia muciniphila LWHK0005 (DSM35274), Akkermansia muciniphila LWHK0006 (DSM35275), and Akkermansia muciniphila LWHK0008 (NITE BP-04475).

[0007] Another one embodiment of the present disclosure provides a composition for increasing glucagon-like peptide-1, comprising: the Akkermansia muciniphila as above mentioned; and a pharmaceutical or food-acceptable carrier.

[0008] In some embodiments, carrier is selected from micro-crystalline cellulose (MCC), trehalose, maltodextrin, rice flour, magnesium stearate, inositol, dextrose, sucrose, and any combination thereof.

[0009] Another one embodiment of the present disclosure provides a method of increasing glucagon-like peptide-1, comprising administering to a subject in need thereof an effective amount of a composition, wherein the composition comprises Akkermansia muciniphila selected from the group consisting of Akkermansia muciniphila LWHK0001, LWHK0002, LWHK0003 (DSM35051), LWHK0004, LWHK0005, LWHK0006, and LWHK0008.

[0010] In some embodiments, the Akkermansia muciniphila is live bacteria.

[0011] In some embodiments, the composition is a food composition or a pharmaceutical composition.

[0012] In some embodiments, composition is administered to a subject orally or parenterally.

[0013] Another one embodiment of the present disclosure provides a culture supernatant of Akkermansia muciniphila prepared by the following steps, comprising: providing a bacteria culture medium, wherein the bacteria culture medium comprises the Akkermansia muciniphila selected from the group consisting of LWHK0001, LWHK0002, LWHK0003, LWHK0004, LWHK0005, LWHK0006, and LWHK0008; and centrifuging the bacteria culture medium to obtain a culture supernatant, wherein the culture supernatant comprises a secretion of the Akkermansia muciniphila, a metabolite of the Akkermansia muciniphila, or a combination thereof.

[0014] In some embodiments, the Akkermansia muciniphila is the LWHK0008, and the culture supernatant was separated into a fraction with a molecular weight more than 3 kDa, a fraction with a molecular weight from 3 kDa to 10 kDa, a fraction with a molecular weight from 3 kDa to 50 kDa, a fraction with a molecular weight from 50 kDa to 100 kDa, or a fraction with a molecular weight more than 100 kDa.

[0015] Another one embodiment of the present disclosure provides a composition with a culture supernatant of Akkermansia muciniphila, comprising: the culture supernatant of Akkermansia muciniphila as above mentioned; and a pharmaceutical or food-acceptable carrier.

[0016] Another one embodiment of the present disclosure provides a method of increasing glucagon-like peptide-1, comprising administering to a subject in need thereof an effective amount of a composition, wherein the composition comprises the culture supernatant of Akkermansia muciniphila as above mentioned.

[0017] Another one embodiment of the present disclosure provides an extract of Akkermansia muciniphila prepared by the following steps, comprising: providing the culture supernatant of Akkermansia muciniphila as above mentioned, wherein the Akkermansia muciniphila is the LWHK0003; extracting a portion of the culture supernatant with ethyl acetate to obtain an ethyl acetate aqueous layer and an ethyl acetate organic layer; drying the ethyl acetate aqueous layer and the ethyl acetate organic layer respectively, to obtain an ethyl acetate aqueous layer extract and an ethyl acetate organic layer extract respectively; extracting a remaining portion of the culture supernatant with n-hexane to obtain an n-hexane aqueous layer and an n-hexane organic layer; and drying the n-hexane aqueous layer and the n-hexane organic layer respectively, to obtain an n-hexane aqueous layer extract and an n-hexane organic layer extract.

[0018] Another one embodiment of the present disclosure provides a composition with extract of Akkermansia muciniphila, comprising: the extract of Akkermansia muciniphila as above mentioned, comprising the ethyl acetate aqueous layer extract, the ethyl acetate organic layer extract, or the n-hexane organic layer extract; and a pharmaceutical or food-acceptable carrier.

[0019] Another one embodiment of the present disclosure provides a method of increasing glucagon-like peptide-1, comprising administering to a subject in need thereof an effective amount of a composition, wherein the composition comprises the extract of Akkermansia muciniphila as above mentioned, wherein the extract of Akkermansia muciniphila comprises the ethyl acetate aqueous layer extract, the ethyl acetate organic layer extract, or the n-hexane organic layer extract.

[0020] In some embodiments, the composition is food composition or pharmaceutical composition.

[0021] In some embodiments, the composition is administered to a subject orally or parenterally.

### BRIEF DESCRIPTION OF THE DRAWINGS

[0022] Aspects of the present disclosure are best understood from the following detailed description when read with the accompanying Figures. It is noted that, in accordance with the standard practice in the industry, various features are not drawn to scale. In fact, the dimensions of the various features may be arbitrarily increased or reduced for clarity of discussion. The disclosure can be more fully understood by reading the following detailed description of the embodiment, with reference made to the accompanying drawings as follows:

[0023] FIG. 1 depicts the differences in blood GLP-1 secretion in mice after glucose ingestion by different AKK strains according to some embodiments of the present disclosure. One-way ANOVA, * indicates p<0.05, ** indicates p<0.01.

[0024] FIG. 2 depicts the differences in GLP-1 secretion in NCI-H716 cells after treatment with different AKK culture supernatants according to some embodiments of the present disclosure. T-test, * indicates p<0.05, ** indicates p<0.01.

[0025] FIG. 3 depicts the difference in GLP-1 secretion in NCI-H716 cells after treatment with extract of LWHK0003 culture supernatant according to some embodiments of the present disclosure. T-test, * indicates p<0.05, ** indicates p<0.01. Con: an equal volume of dimethyl sulfoxide (DMSO) as the negative control group, CA7S: cholic acid-7-sulfate as the positive control group.

[0026] FIG. 4 depicts the differences in GLP-1 secretion in NCI-H716 cells after treatment with LWHK0008 culture supernatant according to some embodiments of the present disclosure. T-test, ** indicates p<0.01.

[0027] FIG. 5 depicts the differences in GLP-1 secretion in NCI-H716 cells after treatment with different fractions of LWHK0008 culture supernatant obtained by molecular weight separation according to some embodiments of the present disclosure. T-test, ** indicates p<0.01. BHI: brain heart infusion culture medium.

[0028] FIG. 6 depicts the difference in plasma GLP-1 secretion in mice after oral gavage with fraction of LWHK0008 strain with a molecular weight from 3 kDa to 10 kDa according to some embodiments of the present disclosure. T-test, * indicates p<0.05.

### DETAILED DESCRIPTION

[0029] The following disclosure provides detailed description of many different embodiments, or examples, for implementing different features of the provided subject matter. These are, of course, merely examples and are not intended to limit the invention but to illustrate it. In addition, various embodiments disclosed below may combine or substitute one embodiment with another, and may have additional embodiments in addition to those described below in a beneficial way without further description or explanation. In the following description, many specific details are set forth to provide a more thorough understanding of the present disclosure. It will be apparent, however, to those skilled in the art, that the present disclosure may be practiced without these specific details.

[0030] Further, spatially relative terms, such as “beneath,” “over” and the like, may be used herein for ease of description to describe one element or feature's relationship to another element(s) or feature(s) as illustrated in the Figures. The spatially relative terms are intended to encompass different orientations of the device in use or operation in addition to the orientation depicted in the Figures. The apparatus may be otherwise oriented (rotated 90 degrees or at other orientations) and the spatially relative descriptors used herein may likewise be interpreted accordingly.

[0031] The terminology used herein is for the purpose of describing particular embodiments only and is not intended to be limiting of the invention. As used herein, the singular forms “a”, “an” and “the” are intended to include the plural forms as well, unless the context clearly indicates otherwise. It will be further understood that the terms “comprises” and/or “comprising”, or “includes” and/or “including” or “has” and/or “having” when used in this specification, specify the presence of stated features, regions, integers, steps, operations, elements, and/or components, but do not preclude the presence or addition of one or more other features, regions, integers, steps, operations, elements, components, and/or groups thereof.

[0032] Further, when a number or a range of numbers is described with “about,” “approximate,” and the like, the term is intended to encompass numbers that are within a reasonable range considering variations that inherently arise during manufacturing as understood by one of ordinary skill in the art. For example, the number or range of numbers encompasses a reasonable range including the number described, such as within +/−10% of the number described, based on known manufacturing tolerances associated with manufacturing a feature having a characteristic associated with the number. This repetition is for the purpose of simplicity and clarity and does not in itself dictate a relationship between the various embodiments and/or configurations discussed.

[0033] Since there are many causes of obesity, some obese subjects may be patients with GLP-1 deficiency. Supplementing with GLP-1 can slow down the peristalsis of the intestines and reduce the digestion rate, thereby reducing the rate of energy intake and achieving the ideal effect of weight loss.

[0034] Some embodiments of the present disclosure provide a Akkermansia muciniphila selected from the group consisting of: Akkermansia muciniphila LWHK0001 (DSM35271), Akkermansia muciniphila LWHK0002 (DSM35272), Akkermansia muciniphila LWHK0004 (DSM35273), Akkermansia muciniphila LWHK0005 (DSM35274), Akkermansia muciniphila LWHK0006 (DSM35275), and Akkermansia muciniphila LWHK0008 (NITE BP-04475).

[0035] In some embodiments, the probiotic is live bacteria.

[0036] In some embodiments, an amount of the probiotic is from 1×10⁸ CFU/g to 1×10¹¹ CFU/g, for example, 1×10⁸ CFU/g, 2×10⁸ CFU/g, 3×10⁸ CFU/g, 4×10⁸ CFU/g, 5×10⁸ CFU/g, 6×10⁸ CFU/g, 7×10⁸ CFU/g, 8×10⁸ CFU/g, 9×10⁸ CFU/g, 1×10⁹ CFU/g, 2×10⁹ CFU/g, 3×10⁹ CFU/g, 4×10⁹ CFU/g, 5×10⁹ CFU/g, 6×10⁹ CFU/g, 7×10⁹ CFU/g, 8×10⁹ CFU/g, 9×10⁹ CFU/g, 1×10¹⁰ CFU/g, 2×10¹⁰ CFU/g, 3×10¹⁰ CFU/g, 4×10¹⁰ CFU/g, 5×10¹⁰ CFU/g, 6×10¹⁰ CFU/g, 7×10¹⁰ CFU/g, 8×10¹⁰ CFU/g, 9×10¹⁰ CFU/g, 1×10¹¹ CFU/g, or any value between any two of these values.

[0037] In some embodiments, the composition is suitable for use in an obese subject. In some examples, the obese subject is caused by following selected from the group consisting of diet, type 2 diabetes, hyperglycemia, glucose intolerance, dyslipidemia, insulin resistance, hyperinsulinemia, fatty liver, cardiovascular disease, stroke, cancer and combinations thereof.

[0038] In some embodiments, composition is administered to a subject orally or parenterally. In some embodiments, composition is formulated into an oral dosage form selected from the group consisting of solution, suspension, emulsion, powder, lozenge, pill, syrup, buccal lozenge, tablet, chewing gum and capsule for administration to a subject.

[0039] In some embodiments, pharmaceutically acceptable carrier includes, but is not limited to, water, alcohols, glycol, preserving agents, antioxidants, solvent, emulsifier, suspending agent, decomposer, binding agent, excipient, stabilizing agent, chelating agent, diluent, gelling agent, preservative, lubricant, absorption enhancers, active agents, humectants, odor absorbers, fragrances, pH adjusting agents, occlusive agents, emollients, thickeners, solubilizing agents, penetration enhancers, anti-irritants, colorants, propellants, surfactant, and other similar or applicable carriers for the present invention.

[0040] In some embodiments, composition can be a food composition. For example, edible materials are added in the form of food additives to prepare a food product for human or animal consumption. Food composition includes, but is not limited to, general foods, health foods, beverages, nutritional supplements, dairy products or feeds, etc. In some examples of oral dosage forms, the composition may optionally include pharmaceutical and food-acceptable carriers, excipients and/or additives. In other examples, the dosage form of the composition may include, but is not limited to, powders, tablets, granules, suppositories, microcapsules, ampoules, liquid sprays or suppositories.

[0041] In some embodiments, the composition is administered orally or parenterally.

[0042] In some embodiments, a culture supernatant of Akkermansia muciniphila was prepared by suspending a certain number of AKK strains in BHI culture medium to form a bacteria culture medium and culturing for 32 hours. In some examples, a certain number of AKK strains include, but are not limited to, from 1×10⁵ CFU/mL to 1×10⁸ CFU/mL, for example, 1×10⁵ CFU/mL, 1×10⁶ CFU/mL, 5×10⁶ CFU/mL, 1×10⁷ CFU/mL, 5×10⁷ CFU/mL, 1×10⁸ CFU/mL, or any value between any two of these values. Next, the bacteria culture medium was centrifuged to obtain a precipitate containing bacteria and a culture supernatant. In some examples, the purpose of centrifugation is to initially isolate and remove the strains while retaining the produced secretions and metabolites during the culture process. Therefore, any known centrifugation speed and time that achieves this effect can be used. Centrifugation conditions include, but are not limited to, 10,000×g for 30 minutes. Next, the culture supernatant may be selectively filtered through a 0.22 μm filter to remove any remaining strains. In some examples, the centrifuged culture supernatant may contain no or a small amount of strains; if a small amount of strains are present, further filtration with a filter membrane can be used to remove any remaining strains.

[0043] In some embodiments, an extract of Akkermansia muciniphila is obtained by extracting the portion of the culture supernatant as aforementioned with ethyl acetate (EA) to obtain an ethyl acetate aqueous layer (EA_H₂O) and an ethyl acetate organic layer (EA_EA). In some examples, a volume percentage of the ethyl acetate includes, but is not limited to, 5%, 10%, 20%, 30%, 40%, 50%, 60%, 70%, 80%, 90%, 95%, 99.5%, or any value between any two of these values. The types of substances extracted from the ethyl acetate aqueous layer with different volume percentages of ethyl acetate were roughly the same, and the types of substances extracted from the ethyl acetate organic layer with different volume percentages of ethyl acetate were roughly the same. The only difference was that a higher volume percentage of ethyl acetate resulted in a larger volume of ethyl acetate organic layer, and the more amount of non-polar metabolites can be extracted (with the same types of substances), while a smaller volume of ethyl acetate aqueous layer resulted in less amount of polar metabolites can be extracted (with the same types of substances), and vice versa. The remaining portion of the supernatant was extracted with n-hexane (Hex) to obtain an n-hexane aqueous layer (Hex_H₂O) and an n-hexane organic layer (Hex_Hex). In some examples, a volume percentage of n-hexane includes, but is not limited to, 5%, 10%, 20%, 30%, 40%, 50%, 60%, 70%, 80%, 90%, 95%, 99.5%, or any value between any two of these values. The types of substances extracted from n-hexane aqueous layers with different volume percentages of n-hexane were roughly the same, and the types of substances extracted from the n-hexane organic layers with different volume percentages of n-hexane were roughly the same. The only difference is that a higher volume percentage of n-hexane resulted in a larger volume of n-hexane organic layer, and the more amount of non-polar metabolites can be extracted (with the same types of substances), while a smaller volume of n-hexane aqueous layer resulted in less amount of polar metabolites can be extracted (with the same types of substances), and vice versa.

[0044] One embodiment of the present disclosure also provides a use (application) of Akkermansia muciniphila, an extract of Akkermansia muciniphila, a culture supernatant of Akkermansia muciniphila, or a fraction of a culture supernatant of Akkermansia muciniphila for the manufacture of a composition for preventing or treating reduced GLP-1 secretion, wherein the Akkermansia muciniphila is selected from the group consisting of Akkermansia muciniphila LWHK0001, LWHK0002, LWHK0003, LWHK0004, LWHK0005, LWHK0006, and LWHK0008, in which the culture supernatant of Akkermansia muciniphila includes a secretion of the Akkermansia muciniphila, a metabolite of the Akkermansia muciniphila, or a combination thereof, in which the extract of Akkermansia muciniphila includes an ethyl acetate aqueous layer extract, an ethyl acetate organic layer extract, or an n-hexane organic layer extract, in which the culture supernatant of Akkermansia muciniphila includes a fraction with a molecular weight more than 3 kDa, a fraction with a molecular weight from 3 kDa to 10 kDa, a fraction with a molecular weight from 3 kDa to 50 kDa, a fraction with a molecular weight from 50 kDa to 100 kDa, or a fraction with a molecular weight more than 100 kDa.

[0045] One embodiment of the present disclosure also provides a use (application) of Akkermansia muciniphila, an extract of Akkermansia muciniphila, a culture supernatant of Akkermansia muciniphila, or a fraction of a culture supernatant of Akkermansia muciniphila for the manufacture of a composition for preventing or treating glucagon-like peptide-1 insufficiency, wherein the Akkermansia muciniphila is selected from the group consisting of Akkermansia muciniphila LWHK0001, LWHK0002, LWHK0003, LWHK0004, LWHK0005, LWHK0006, and LWHK0008, in which the culture supernatant of Akkermansia muciniphila includes a secretion of the Akkermansia muciniphila, a metabolite of the Akkermansia muciniphila, or a combination thereof, wherein the extract of Akkermansia muciniphila includes the ethyl acetate aqueous layer extract, the ethyl acetate organic layer extract, or the n-hexane organic layer extract, wherein the culture supernatant of Akkermansia muciniphila includes a fraction with a molecular weight more than 3 kDa, a fraction with a molecular weight from 3 kDa to 10 kDa, a fraction with a molecular weight from 3 kDa to 50 kDa, a fraction with a molecular weight from 50 kDa to 100 kDa, or a fraction with a molecular weight more than 100 kDa.

[0046] One embodiment of the present disclosure also provides a use (application) of Akkermansia muciniphila, an extract of Akkermansia muciniphila, a culture supernatant of Akkermansia muciniphila, or a fraction of a culture supernatant of Akkermansia muciniphila for the manufacture of a composition for preventing or treating glucagon-like peptide-1 deficiency, wherein the Akkermansia muciniphila is selected from the group consisting of Akkermansia muciniphila LWHK0001, LWHK0002, LWHK0003, LWHK0004, LWHK0005, LWHK0006, and LWHK0008, in which the culture supernatant of Akkermansia muciniphila includes a secretion of the Akkermansia muciniphila, a metabolite of the Akkermansia muciniphila, or a combination thereof, in which the extract of Akkermansia muciniphila includes the ethyl acetate aqueous layer extract, the ethyl acetate organic layer extract, or the n-hexane organic layer extract, wherein the culture supernatant of Akkermansia muciniphila includes a fraction with a molecular weight more than 3 kDa, a fraction with a molecular weight from 3 kDa to 10 kDa, a fraction with a molecular weight from 3 kDa to 50 kDa, a fraction with a molecular weight from 50 kDa to 100 kDa, or a fraction with a molecular weight more than 100 kDa.

[0047] A number of examples are provided herein to elaborate the composition of the instant disclosure. However, the examples are for demonstration purpose alone, and the instant disclosure is not limited thereto.

[0048] A number of examples are provided herein to elaborate the Akkermansia muciniphila, culture supernatant, extract, and use thereof of the instant disclosure for increasing glucagon-like peptide-1. However, the examples are for demonstration purpose alone, and the instant disclosure is not limited thereto.

[0049] For the sake of clarity, features and elements that are well known in the art and are not necessary for an understanding of the principles described have been omitted.

### Example 1 Identification of Strains

[0050] The strains of Akkermansia muciniphila LWHK0001, 0002, 0003, 0004, 0005, and 0006 of the present disclosure have been deposited at bioresource collection and research center (BCRC) in Taiwan (address of depositary institution: No. 331 Shih-Pin Road, Hsinchu, Taiwan 300), and also have been deposited at Leibniz Institute DSMZ-German Collection of Microorganisms and Cell Cultures GmbH (address of depositary institution: Inhoffenstraβe 7B, 31824 Braunschweig, Germany). The strain of Akkermansia muciniphila LWHK0008 has been deposited at International Patent Organism Depositary (IPOD) of National Institute of Technology and Evaluation (NITE) (address of depositary institution: #122, 2-5-8 Kazusakamatari, Kisarazu-shi, Chiba 292-0818, Japan). Detailed information is shown in Tables 1 and 2 below.

TABLE 1

| | | | Genomic DNA |
|---|---|---|---|
| | | | sequence |
| Strains | Deposit number | Deposit date | SEQ ID NO: |
| LWHK0001 | BCRC911246 | 2024 Nov. 21 | 1 |
| LWHK0002 | BCRC911247 | 2024 Nov. 21 | 2 |
| LWHK0003 | BCRC911209 | 2023 Nov. 21 | 3 |
| LWHK0004 | BCRC911248 | 2024 Nov. 21 | 4 |
| LWHK0005 | BCRC911249 | 2024 Nov. 21 | 5 |
| LWHK0006 | BCRC911250 | 2024 Nov. 21 | 6 |
| LWHK0008 | NITE BP-04475 | 2025 Oct. 22 | 7 |

[0051] The strains of Akkermansia muciniphila LWHK0001, 0002, 0003, 0004, 0005, 0006, and 0008 of the present disclosure are extremely anaerobic bacteria, isolated from feces of healthy humans in Taiwan. The strain is oval in shape, with a diameter of approximately from 0.4 to 0.6 micrometers and a length of approximately from 0.6 to 1 micrometer. The Akkermansia muciniphila live bacteria of the present disclosure were cultured in Brain Heart Infusion Broth (BHI) under anaerobic conditions at 37° C. The strains of Akkermansia muciniphila LWHK0001, 0002, 0003, 0004, 0005, 0006, and 0008 have a common sequence as set forth in SEQ ID NO: 8, located from approximately 2234 kbp to 2646 kbp in the LWHK0001 genomic DNA, from approximately 2643 kbp to 2237 kbp in the LWHK0002 genomic DNA, from approximately 603 kbp to 600 kbp in the LWHK0003 genomic DNA, from approximately 658 kbp to 655 kbp in the LWHK0004 genomic DNA, from approximately 2338 kbp to 2341 kbp in the LWHK0005 genomic DNA, from approximately 2318 kbp to 2321 kbp in the LWHK0006 genomic DNA and from approximately 2232 kbp to 2235 kbp in the LWHK0008 genomic DNA, and the common sequence does not present in the standard strain of Akkermansia muciniphila ATCC BAA-835. This common sequence was analyzed using an online system (Open Reading Frame Finding https://www.ncbi.nlm.nih.gov/orffinder/), predicting approximately 20 open reading frames (ORFs). Wherein, ORF 11, with 838 amino acids (SEQ ID NO: 9), did not align to any known genes; ORF 12, with 997 amino acids (SEQ ID NO: 10), should be a gene containing the beta-N-acetylglucosamine (β-NAGase) domain. The β-NAGase is a glycosidase responsible for cleaving the bonds between β-N-acetylglucosamine (β-GlcNAc, β-NAG) and other glycosyl groups. Proteins containing this functional domain are primarily involved in polysaccharide metabolism, protein modification regulation, cell wall degradation, or extracellular matrix (ECM) remodeling.

[0052] A whole-genome identification was performed with the strains of Akkermansia muciniphila LWHK0001, 0002, 0003, 0004, 0005, 0006, and 0008 of the present disclosure, and the standard strain ATCC BAA-835 was used as the basis for comparison. The identification items included ANIb (average nucleotide identity on BLAST, calculated based on BLAST+), ANIm (calculated based on MUMmer), Pearson correlation coefficient (PCC, statistical analysis of tetranucleotide usage patterns), and Aligned (aligned to the total nucleotide acids of ATCC BAA-835, 2664102 bp).

TABLE 2

| Genome | ANIb [%] | ANIm [%] | PCC | Aligned [bp] |
|---|---|---|---|---|
| LWHK0001 | 98.56 | 98.90 | 0.99905 | 2483464 |
| LWHK0002 | 87.20 | 88.69 | 0.95334 | 2128605 |
| LWHK0003 | 87.25 | 88.68 | 0.95234 | 2109990 |
| LWHK0004 | 87.12 | 98.84 | 0.95087 | 2102040 |
| LWHK0005 | 98.68 | 88.64 | 0.99877 | 2530209 |
| LWHK0006 | 98.79 | 98.94 | 0.99904 | 2543814 |
| LWHK0008 | 97.22 | 97.51 | 0.99943 | 2450656 |

[0053] As shown in Table 2 above, there are differences between the genomes according to the results of the whole genome average nucleotide identity (ANI) analysis with the standard strain ATCC BAA-835, indicating that LWHK0001, LWHK0002, LWHK0003, LWHK0004, LWHK0005, LWHK0006, and LWHK0008 are new isolated strains.

### Example 2 Differences in Blood GLP-1 Secretion Among Different AKK Strains in Mice after Glucose Ingestion

[0054] This experiment used 8- to 12-week-old germ-free C57BL/6 male mice, randomly assigned to three experimental groups and one control group. At the start of the experiment, the experimental groups were administered different strains of Akkermansia muciniphila (AKK) via gavage: BAA-835 (residually stored in ATCC and freely available for distribution), LWHK0001, and LWHK0003 live bacteria. At the beginning of the experiment, each group was gavaged with different strains of Akkermansia muciniphila (AKK) once, with a bacterial count of 4×10⁸ CFU, suspended in phosphate-buffered saline (PBS) containing 2.5% glycerol. The control group was gavaged with an equal volume of PBS containing 2.5% glycerol. One week later, mouse feces were collected and prepared into smears for Gram staining to confirm bacterial colonization in the mouse intestines and the absence of other bacterial contamination. Two weeks after gavage administration of live bacteria, a GLP-1 secretion efficacy test was performed.

[0055] After mice or humans ingest carbohydrates, fats, and proteins, their intestinal L-cells are induced to secrete GLP-1 into the blood. To compare the differences in the efficacy of different AKK strains in promoting GLP-1 secretion in mice, mice were administrated glucose solution, and the concentration of GLP-1 in the blood of the mice after glucose ingestion was detected. The experimental procedure is as follows: after fasting for 5 hours, mice were given glucose solution via oral gavage at a dose of 2 g/kg BW. Blood was collected 10 minutes later, and dipeptidyl peptidase-4 (DPP4) inhibitor was added to prevent GLP-1 degradation. After separating plasma from the blood sample, the amount of GLP-1 in the sample was analyzed by an ELISA kit.

[0056] Please refer to drawing F1 of FIG. 1. After different AKK strains colonized in mice for 2 weeks, the differences in blood GLP-1 secretion in different groups of mice after glucose ingestion were tested. The blood GLP-1 concentration in the control group was 32.49 pg/mL, the blood GLP-1 concentration in the BAA-835 group was 42.55 pg/mL, the blood GLP-1 concentration in the LWHK0001 group was 50.96 pg/mL, and the blood GLP-1 concentration in the LWHK0003 group was 50.95 pg/mL. Statistical analysis showed that the blood GLP-1 levels in mice colonized by LWHK0001 and LWHK0003 strains were significantly higher than those in the control group and the BAA-835 group. The above experimental results show that the AKK BAA-835, LWHK0001, and LWHK0003 live bacteria all have the effect of promoting GLP-1 secretion in mice, wherein the AKK LWHK0001 and LWHK0003 are more effective than the AKK BAA-835.

### Example 3 Differences in GLP-1 Secretion in NCI-H716 Cells after Treatment with Different AKK Culture Supernatants

[0057] A preparation method of AKK culture supernatant: A suspension of 1×10⁶ CFU/mL AKK strain was cultured in BHI medium for 32 hours. Next, the culture medium was centrifuged at 10,000×g, 4° C., for 30 minutes to obtain a precipitate containing bacteria and a culture supernatant. Next, the culture supernatant was then filtered through a 0.22 μm filter to remove any remaining bacteria. Finally, the culture supernatant was concentrated 5-fold using a centrifuge tube. This 5-fold concentrated AKK culture supernatant was used for subsequent cell experiments.

[0058] Cell experiment procedure: The NCI-H716 cell line was used as a cell model (this cell line was obtained from colorectal adenocarcinoma ascites and is currently used as a human model for in vitro research on GLP-1 regulation). The NCI-H716 cell line was cultured in RPMI 1640 medium containing 10% fetal bovine serum (FBS). Next, the cells were seeded on a matrix-coated 96-well plate (Matrigel®) at a cell number of 6×10⁴ cells/well. Next, after culturing the cells on the matrix-coated 96-well plate for 2 days, the experiment was performed. Next, the cell culture medium was removed, and the cells were washed once with Hank's balanced salt solution (HBSS). Next, the HBSS was removed, and HBSS containing 180 μL of 0.2% BSA was added to the cells and treated for 2 hours. Next, 20 μL of 5-fold concentrated AKK culture supernatant was added into the experimental group, while the control group was added with the same volume of HBSS for 2 hours. Next, cell culture medium was collected and Diprotin A (final concentration 10 μM) was added (Note: Diprotin A is a DPP4 inhibitor, inhibiting the DPP4 enzyme to prevent GLP-1 from being broken down by DPP4). Finally, the GLP-1 concentration in the cell culture medium of different groups was analyzed by an ELISA kit.

[0059] Please refer to drawing F2 of FIG. 2, FIG. 2 shows that after treating different groups of NCI-H716 cells with culture supernatants of AKK BAA-835, LWHK0001, LWHK0002, LWHK0003, LWHK0004, LWHK0005, and LWHK0006 or HBSS for 2 hours, the GLP-1 concentration was 1.69 pg/mL in the control group, 3.63 pg/mL in the BAA-835 group, 7.16 pg/mL in the LWHK0001 group, 12.12 pg/mL in the LWHK0002 group, 30.10 pg/mL in the LWHK0003 group, 24.37 pg/mL in the LWHK0004 group, 10.24 pg/mL in the LWHK0005 group, and 10.41 pg/mL in the LWHK0006 group. Statistical analysis showed that the culture supernatants of the AKK LWHK0001, LWHK0002, LWHK0003, LWHK0004, LWHK0005, and LWHK0006 were significantly more effective than the culture supernatant of the AKK BAA-835 in inducing GLP-1 secretion in NCI-H716 cells. These results indicate that the culture supernatants of the AKK BAA-835, LWHK0001, LWHK0002, LWHK0003, LWHK0004, LWHK0005, and LWHK0006 all promoted GLP-1 secretion, and the AKK LWHK0001, LWHK0002, LWHK0003, LWHK0004, LWHK0005, and LWHK0006 were more effective than the AKK BAA-835.

### Example 4 Differences in GLP-1 Secretion after Treatment of Different Portions of Extract of LWHK0003 Culture Supernatant

[0060] A preparation method of AKK extract of LWHK0003 culture supernatant: A suspension of 1×10⁶ CFU/mL AKK strain was cultured in BHI medium for 32 hours. Next, the culture medium was centrifuged at 10,000×g, 4° C., for 30 minutes to obtain a precipitate containing bacteria and a culture supernatant. Next, the culture supernatant was then filtered through a 0.22 μm filter to remove any remaining bacteria. Next, a portion of culture supernatant was extracted with 99.5% ethyl acetate (EA) to obtain an ethyl acetate aqueous layer (EA_H₂O) and an ethyl acetate organic layer (EA_EA); a remaining portion of the culture supernatant was extracted with 95% n-hexane (Hex) to obtain an n-hexane aqueous layer (Hex_H₂O) and an n-hexane organic layer (Hex_Hex). Next, the ethyl acetate aqueous layer (EA_H₂O) and the ethyl acetate organic layer (EA_EA), and the n-hexane aqueous layer (Hex_H₂O) and the n-hexane organic layer (Hex_Hex) were dried, respectively, to obtain an ethyl acetate aqueous layer extract and an ethyl acetate organic layer extract, an n-hexane aqueous layer extract and an n-hexane organic layer extract. Uncultured BHI culture medium was also extracted and dried using the method described above. The dried 20 mg sample was redissolved in 0.5 mL of DMSO and used for cell experiments.

[0061] Cell experiment procedure: The NCI-H716 cell line was used as a cell model. The NCI-H716 cell line was cultured in RPMI 1640 medium containing 10% FBS. Next, the cells were seeded on a matrix-coated 96-well plate at a cell number of 6×10⁴ cells/well. Next, after culturing the cells on the matrix-coated 96-well plate for 2 days, the experiment was performed. Next, the cell culture medium was removed, and the cells were washed once with HBSS. Next, the HBSS was removed, and HBSS containing 200 μL of 0.2% BSA was added to the cells and treated for 2 hours. Next, the HBSS containing 0.2% BSA was removed. Next, HBSS containing 0.2% BSA and the extract was added; the control group was treated with HBSS containing 0.2% BSA and DMSO as the same volume as the extract and treated for 2 hours. Next, a cell culture medium was collected and Diprotin A (final concentration 10 μM) was added. Next, the collected cell culture medium was used to analyze the GLP-1 concentration in the cell culture medium of different groups using an ELISA kit.

[0062] Please refer to drawing F3 of FIG. 3, FIG. 3 shows that after treating different groups of NCI-H716 cells with different extracts of the AKK LWHK0003 culture supernatant for 2 hours, the GLP-1 concentration was 1.94 pg/mL in the control group, 18.13 pg/mL in 1 μM CA7S, 6.80 pg/mL in the EA_EA extract of uncultured BHI culture medium, 8.69 pg/mL in the EA_EA extract of the AKK LWHK0003 culture supernatant, 4.65 pg/mL in the EA_H₂O extract of uncultured BHI culture medium, 6.78 pg/mL in the EA_H₂O extract of the AKK LWHK0003 culture supernatant, 4.30 pg/mL in the Hex_Hex extract of uncultured BHI culture medium, 8.60 pg/mL in the Hex-Hex extract of the AKK LWHK0003 culture supernatant, 7.51 pg/mL in the Hex_H₂O extract of uncultured BHI culture medium, and 6.48 pg/mL in the Hex-H₂O extract of the AKK LWHK0003 culture supernatant. Statistical analysis shows that the EA-H₂O extract of the AKK LWHK0003 culture supernatant was significantly more effective than the EA-H₂O extract from the uncultured BHI culture medium in inducing GLP-1 secretion in NCI-H716 cells; the Hex-Hex extract of the AKK LWHK0003 culture supernatant was significantly more effective than the Hex-Hex extract of the uncultured BHI culture medium in inducing GLP-1 secretion in NCI-H716 cells.

### Example 5

[0063] A preparation method of AKK LWHK0008 culture supernatant: The preparation method is the same as in Example 3, except that the strain used here is AKK LWHK0008. This 5-fold concentrated AKK LWHK0008 culture supernatant was used in the experimental group. The uncultured BHI culture medium was concentrated 5 times by a centrifuge tube and used as the control group.

[0064] Cell experiment procedure: The NCI-H716 cell line was used as a cell model, and the NCI-H716 cell line was cultured in RPMI 1640 medium containing 10% FBS. Next, the cells were seeded on a matrix-coated 96-well plate at a cell number of 6×10⁴ cells/well. Next, after culturing the cells on the matrix-coated 96-well plate for 2 days, the experiment was performed. Next, the cell culture medium was removed, and the cells were washed once with HBSS. Next, the HBSS was removed, and HBSS containing 180 μL of 0.2% BSA was added to the cells and treated for 2 hours. Next, 20 μL of 5-fold concentrated AKK LWHK0008 culture supernatant was added into the experimental group, while the control group was added with the same volume of 5-fold concentrated BHI culture medium containing uncultured bacteria for 2 hours. Next, cell culture medium was collected and Diprotin A (final concentration 10 μM) was added (Note: Diprotin A is a DPP4 inhibitor, inhibiting the DPP4 enzyme to prevent GLP-1 from being broken down by DPP4). Finally, the collected cell culture media were analyzed using an ELISA kit to determine the GLP-1 concentration in the cell culture media of different groups.

[0065] Please refer to drawing F4 of FIG. 4, after treating different groups of NCI-H716 cells with either AKK LWHK0008 culture supernatant or uncultured BHI medium for 2 hours, the GLP-1 concentration in the control group was 6.27 pg/mL, while the GLP-1 concentration in the LWHK0008 group was 15.61 pg/mL. Statistical analysis shows that the LWHK0008 culture medium was significantly more effective than the control group in inducing GLP-1 secretion in NCI-H716 cells. These results indicate that AKK LWHK0008, after culturing, produces a product that promotes GLP-1 secretion in the culture medium.

### Example 6

[0066] A preparation method of AKK LWHK0008 culture supernatant with different molecular weight fractions: AKK LWHK0008 at a concentration of 1×10⁶ CFU/mL cultured in BHI medium became a bacteria culture medium for 32 hours. Next, the bacteria culture medium was centrifuged at 10,000×g, 4° C., for 30 minutes to obtain a precipitate containing bacteria and a culture supernatant. Next, the culture supernatant was then filtered through a 0.22 μm filter to remove any remaining bacteria. Next, the filtered culture supernatant was added into a 3 kDa molecular weight cut-off (MWCO) centrifuge tube and centrifuged to obtain concentrates <3 kDa and >3 kDa. Next, a portion of the >3 kDa concentrate was added into a 50 kDa MWCO centrifuge tube and centrifuged to obtain concentrates of 3-50 kDa and >50 kDa. Next, the >50 kDa concentrate was added into a 100 kDa MWCO centrifuge tube and centrifuged to obtain concentrates of 50-100 kDa and >100 kDa. Finally, the concentrates of >3 kDa, 3-50 kDa, 50-100 kDa, and >100 kDa were used for subsequent cell experiments. Uncultured BHI culture medium was also separated using the above method and used as a control sample.

[0067] Cell experiment procedure: The NCI-H716 cell line was used as a cell model, and the NCI-H716 cell line was cultured in RPMI 1640 medium containing 10% FBS. Next, the cells were seeded on a matrix-coated 96-well plate at a cell number of 6×10⁴ cells/well. Next, after culturing the cells on the matrix-coated 96-well plate for 2 days, the experiment was performed. Next, the cell culture medium was removed, and the cells were washed once with HBSS. Next, the HBSS was removed, and HBSS containing 180 μL of 0.2% BSA was added to the cells and treated for 2 hours. Next, 20 μL of culture supernatant fractions were added to the experimental group, while the control group was added with the same volume of uncultured BHI culture fractions for 2 hours. Next, cell culture medium was collected and Diprotin A (final concentration 10 μM) was added (Note: Diprotin A is a DPP4 inhibitor, inhibiting the DPP4 enzyme to prevent GLP-1 from being broken down by DPP4). Finally, the collected cell culture media were analyzed using an ELISA kit to determine the GLP-1 concentration in the cell culture media of different groups.

[0068] Please refer to drawing F5 of FIG. 5, fractions of AKK LWHK0008 culture medium or uncultured BHI culture medium were used to treat different groups of NCI-H716 cells for 2 hours. In the fraction >3 kDa, the GLP-1 concentration in the control group was 6.31 pg/mL, and the GLP-1 concentration in the LWHK0008 group was 9.15 pg/mL. In the fractions 3-50 kDa, the GLP-1 concentration in the control group was 8.95 pg/mL, and the GLP-1 concentration in the LWHK0008 group was 9.69 pg/mL; in the fraction 50-100 kDa, the GLP-1 concentration in the control group was 9.44 pg/mL, and the GLP-1 concentration in the LWHK0008 group was 11.47 pg/mL; in the fraction >100 kDa, the GLP-1 concentration in the control group was 7.17 pg/mL, the GLP-1 concentration in the LWHK0008 group was 11.25 pg/mL. Statistical analysis shows that the fractions >3 kDa and >100 kDa of LWHK0008 culture supernatant were significantly more effective than the control group in inducing GLP-1 secretion in NCI-H716 cells, while the fraction 50-100 kDa of LWHK0008 culture supernatant showed a trend towards higher than the control group in inducing GLP-1 secretion in NCI-H716 cells. These results indicate that AKK LWHK0008, after cultivation, produces a product that promotes GLP-1 secretion in the culture medium. The molecular weight range of the active substances >3 kDa, 3-50 kDa, 50-100 kDa, and >100 kDa produce a product that promotes GLP-1 secretion in the culture medium.

### Example 7

[0069] A preparation method of a fraction 3-10 kDa of AKK LWHK0008 culture supernatant: AKK LWHK0008 at a concentration of 1×10⁶ CFU/mL cultured in BHI medium became a bacteria culture medium for 32 hours. Next, the bacteria culture medium was centrifuged at 10,000×g, 4° C., for 30 minutes to obtain a precipitate containing bacteria and a culture supernatant. Next, the culture supernatant was then filtered through a 0.22 μm filter to remove any remaining bacteria. Next, the filtered culture supernatant was added into a 3 kDa molecular weight cut-off (MWCO) centrifuge tube and centrifuged to obtain concentrates <3 kDa and >3 kDa. Next, the >3 kDa concentrate was added into a 10 kDa MWCO centrifuge tube and centrifuged to obtain concentrates of 3-10 kDa and >10 kDa. Finally, the concentrates of 3-10 kDa was used for subsequent animal experiments. Uncultured BHI culture medium was also separated using the above method and used as a control sample.

[0070] Cell experiment procedure: Eight-week-old male C57BL/6 mice were randomly assigned to an experimental group and a control group, with eight mice in each group. On the day of the experiment, the mice were fasted for 4 hours, and then each mouse was given 200 μL of sample via oral gavage. Five hours after tube feeding, blood was collected and a DPP4 inhibitor was added to prevent GLP-1 degradation. After separating plasma from the blood samples, the GLP-1 content in the samples was analyzed using an ELISA kit.

[0071] Please refer to drawing F6 in FIG. 6. Mice that had been fasted for 4 hours were given BHI culture medium without culture and the fraction 3-10 kDa of LWHK0008 culture supernatant for 5 hours. The blood GLP-1 concentration in the control group was 8.32 pg/mL, while the concentration in the LWHK0008 group was 9.95 pg/mL. Statistical analysis shows that the blood GLP-1 concentration in the LWHK0008 group was significantly higher than that in the control group. These results indicate that the fraction 3-10 kDa of LWHK0008 culture supernatant can promote GLP-1 secretion.

[0072] While the disclosure has been described by way of example(s) and in terms of the preferred embodiment(s), it is to be understood that the disclosure is not limited thereto. On the contrary, it is intended to cover various modifications and similar arrangements and procedures, and the scope of the appended claims therefore should be accorded the broadest interpretation so as to encompass all such modifications and similar arrangements and procedures.

What is claimed is:

1. An Akkermansia muciniphila selected from the group consisting of:
Akkermansia muciniphila LWHK0001 (DSM35271),
Akkermansia muciniphila LWHK0002 (DSM35272),
Akkermansia muciniphila LWHK0004 (DSM35273),
Akkermansia muciniphila LWHK0005 (DSM35274),
Akkermansia muciniphila LWHK0006 (DSM35275), and
Akkermansia muciniphila LWHK0008 (NITE BP-04475).

2. A composition for increasing glucagon-like peptide-1, comprising:
the Akkermansia muciniphila as claimed in claim 1; and
a pharmaceutical or food-acceptable carrier.

3. The composition of claim 2, wherein the carrier is selected from micro-crystalline cellulose, trehalose, maltodextrin, rice flour, magnesium stearate, inositol, dextrose, sucrose, and any combination thereof.

4. A method of increasing glucagon-like peptide-1, comprising administering to a subject in need thereof an effective amount of a composition, wherein the composition comprises Akkermansia muciniphila selected from the group consisting of Akkermansia muciniphila LWHK0001, LWHK0002, LWHK0003 (DSM35051), LWHK0004, LWHK0005, LWHK0006, and LWHK0008.

5. The method of claim 4, wherein the Akkermansia muciniphila is live bacteria.

6. The method of claim 4, wherein the composition is a food composition or a pharmaceutical composition.

7. The method of claim 4, wherein the composition is administered to a subject orally or parenterally.

8. A culture supernatant of Akkermansia muciniphila prepared by the following steps, comprising:
providing a bacteria culture medium, wherein the bacteria culture medium comprises the Akkermansia muciniphila selected from the group consisting of LWHK0001, LWHK0002, LWHK0003, LWHK0004, LWHK0005, LWHK0006, and LWHK0008; and
centrifuging the bacteria culture medium to obtain a culture supernatant, wherein the culture supernatant comprises a secretion of the Akkermansia muciniphila, a metabolite of the Akkermansia muciniphila, or a combination thereof.

9. The culture supernatant of Akkermansia muciniphila of claim 8, wherein the Akkermansia muciniphila is the LWHK0008, and the culture supernatant was separated into a fraction with a molecular weight more than 3 kDa, a fraction with a molecular weight from 3 kDa to 10 kDa, a fraction with a molecular weight from 3 kDa to 50 kDa, a fraction with a molecular weight from 50 kDa to 100 kDa, or a fraction with a molecular weight more than 100 kDa.

10. A composition with a culture supernatant of Akkermansia muciniphila, comprising:
the culture supernatant of Akkermansia muciniphila as claimed in claim 8; and
a pharmaceutical or food-acceptable carrier.

11. A composition with a culture supernatant of Akkermansia muciniphila, comprising:
the culture supernatant of Akkermansia muciniphila as claimed in claim 9; and
a pharmaceutical or food-acceptable carrier.

12. A method of increasing glucagon-like peptide-1, comprising administering to a subject in need thereof an effective amount of a composition, wherein the composition comprises the culture supernatant of Akkermansia muciniphila as claimed in claim 8.

13. A method of increasing glucagon-like peptide-1, comprising administering to a subject in need thereof an effective amount of a composition, wherein the composition comprising the culture supernatant of Akkermansia muciniphila as claimed in claim 9.

14. An extract of Akkermansia muciniphila prepared by the following steps, comprising:
providing the culture supernatant of Akkermansia muciniphila as claimed in claim 8, wherein the Akkermansia muciniphila is the LWHK0003;
extracting a portion of the culture supernatant with ethyl acetate to obtain an ethyl acetate aqueous layer and an ethyl acetate organic layer;
drying the ethyl acetate aqueous layer and the ethyl acetate organic layer respectively, to obtain an ethyl acetate aqueous layer extract and an ethyl acetate organic layer extract respectively;
extracting a remaining portion of the culture supernatant with n-hexane to obtain an n-hexane aqueous layer and an n-hexane organic layer; and
drying the n-hexane aqueous layer and the n-hexane organic layer respectively, to obtain an n-hexane aqueous layer extract and an n-hexane organic layer extract.

15. A composition with extract of Akkermansia muciniphila, comprising:
the extract of Akkermansia muciniphila as claimed in claim 14, comprising the ethyl acetate aqueous layer extract, the ethyl acetate organic layer extract, or the n-hexane organic layer extract; and
a pharmaceutical or food-acceptable carrier.

16. A method of increasing glucagon-like peptide-1, comprising administering to a subject in need thereof an effective amount of a composition, wherein the composition comprises the extract of Akkermansia muciniphila as claimed in claim 14, wherein the extract of Akkermansia muciniphila comprises the ethyl acetate aqueous layer extract, the ethyl acetate organic layer extract, or the n-hexane organic layer extract.

17. The method of claim 16, wherein the composition is a food composition or a pharmaceutical composition.

18. The method of claim 16, wherein the composition is administered to a subject orally or parenterally.

The application's sequence listing, which the Patent Office published only in electronic form, follows.

SEQUENCE LISTING (10 sequences)

SEQ ID NO: 1 - DNA, 2700888 bp, Akkermansia muciniphila (residues 1-1,350,444 of 2,700,888)
  source 1..2700888: mol_type = genomic DNA
caatcccgtattgatatttccgccagtttggccgccgaaccccttattgtagaggtatagttctccgttattagtgaattccagcaccatgctgttggattctccggagaccgttccattggtgtacaggctgaaaatgtctttccacccattgctggtggaactcaggtttttcaggtcaaagctcacggtgaaactgccttggatgcccgttatgtttgagttatagggagtgccggaactgctgccgaacgtagcgtaatcattgccggaagtgtaattgaaggaaccgttccagttgggggcggttatttgtgctccttccgcagtccattcccaggaatagataggggtagccgcctgggccatgcctgccgctgccagtaaagataaaataataaatgagcgtttcacggaaattctgaaatatgggttaaaatcaatccaataggagggtagcggattataaatccggggtcaaattatttttctgaaaacaaatcatttaacggaaaaaagattacggagaagataaaagaagagaaaacagaaacggcattcctgttggaaagaaaacgtacatttccaataaaattgccgcatcctgggaaaaaagagacaatatccggatttataatccgcacaaggatattgaagaaatctgattccccggaatggatttttaagaatgcttaaataatttgaaaaaccttttcatgcaagatatgcccggagaaattgcatattactatatatagtatgcttttaaaaaaatactgccaaatattagggtttgacggagaaatggcttgaaccatgaaaggcacttatgagaagatgcgaggcagataaaagcacagacacatgaagtttaccatttccaagcaagtatttctcgacgggctgagacaggttgccagcgtcgtgtcttccaagacgacgctgcccattctttccaatgtcaagattgaagctgaaaacggccagatacgttttacggctactgatcttgatgtatgcattactggcgtggttcccgcaaatgtgctgcgtgaaggcaccgtgaccctgcccgctaaaaagctggtgagcatcatcagcgaacttcctgaagccgaagtccaggtggatgtcaaccaacgcaaccaggctgctgtggaatgcggccgctcccagtttaaactgaacggccttccggcggatgaatttccggaactgccgtcttttgagcaggctactgtgtaccaggtggagcagaatatgttgcgtgactgtatccgccggacggaatatgccatttccacggatacgacccgctacgtgttgaacggcatttccctttctttccgcaatggtaaaatgactttggtagccacggacggacgtcgtctggctttggcggaaaccgccctggaatttccggaagaacagcaactggatgccatcctgcccactaaggctgtcggagaactccgccgccttctggatgaagtgggaaccgtcacgatccggttcacacgcaaccaggcagcctttgaaatcaacgatacgctcttaatcagcaaactgattgacggcaattacccgaactaccggcaggtaattcctacggattgcaaggaaagtatcgaacttccctgcggggaactgctggaaacagtgcgccgtgtttctctcctttccgtggataagagcacaaatatcaagctgaattttcgtgaaaacgaactggaagtggcttccagcgcagaaggagtgggcgaagctcatgaatcgatgacgatcacttattccggaaggccgctttccatttcctttaatccggatttcttcatggctcccctgaagacgatggccggggatacggtcattacgctgaacctcattgatgaaatgagtccgggcgtcttgaagattggcgatgagttcctgtatgtgctcatgccgatgagatctcccaattgattttggtggcacaaaatcgttcatacagaggaacaggcgtcgtggagacatgacgcctgtttttttattggctgagagtgaatggaaaagaaatgttattcacataaatgttctacgtggaacattttttattttccattacaggaaaactgtaatctgccttgaaaagacggaacacctgaatggggcgcgaggggcatcaccggaaacctctgcgacgacgggagaatgccattatccgggaatgagaagatgcggggacagcaaatattcagagcggagaattgacaaattttactccgtatcactcgcccagcagatccggaggagcgaacaagtccggagcaagatgaaagggataaaaaccggacgcttgaagaatggcttcacggacggaggatatggaattgaaacaggaatgttccacatccagaatacgtccgtccttcaatttaatcatcaatccgggttctgcctcattatttggtgtgcatcctatgcgttcaattaattcccacggtatttccctgcgtgaaatgctgttgccccagaagatggaagaagaagtgattgtgagaaaataaggcctgcccataataacgggaagccacaggaacagtaaaagggcgccgagaagaaagttccaccagccggaaccgaaaaaagcccaggccaggctgcatcccagggttccgagaattctccctcccagccgataactgcggtagaaataataagtgttcatgagttgcgaagtcaatgaaacgtcaaaccgaccatggaacaataagttcccgaccgtattctatacgctaccgctttatcccggcaaagacaagatgataagtcaggaaatccagttcagcatgtcaggcggtacggaaccgcaggaacgtatcagggaaagaaaatgctcttccatttccggcggaggagaaaaaaggcctggcaaaactcggccttcggcaagttccagagctccctggttatgaagagccaggggcggatcaatgtaacgcatttgcgtagggtccggcagaataaaattaagagggcggccttcgttcagaaggcggtttttcggaatttccggcccccattcatcctccacacccatattggcaagcagaacgccggaagagaaaggcatggccgggtcaataagccctgacatggcatgccgctttcccgtagccgtaacggcgcagaaagcatgcctgattgcgtcagtaagggtttccctgtccgttgcaagcacaaaagaggcggaagccagaggttttttttccacgtccgctacaatgacattcagtttccgtctgagagcatgcagagctattccacggccaacttttccatgtccaatgactaccagagtctgtccctgttcattttttattccaagagattccagagcccggaaaaaactttctccggttccaaggcaggtttctatctgtttaatctttccggcgtccaccatccacacgggctgcatgcatgccgcatagcgttccgcacccgagcgggttaattccacatacccgcagcggctgggaacatggctgagcgctccggcgcagtccatgaccacatcataaggtccgcctacccgttccgcttccaccacgggaattccatactgtcccaataatacggctgtttccgggtcatagggcattaccggggagaccgctactgtcagctccgctcctgcggccagaagagaggcgtatttggcgcaggtattccggaacacgggagaagcgtcaataatccggcatccttccagagggcgactttccgaccacgttttatactggtgcaggagaacgggaaattcttcctgccggtaaaaggggaacaaattttccagaatgcgctccggagatgcaggcataacaaaaatcttagggtttctcgcagcagagggtaatccctatcctgtcgttttcccagaaaaactttgttaaagaaatatcttttgtttaataatttttaaaagctgtagccagttcagggaagacaaagtgctaagtcatctatattcgcttgcaagtattttatgcgcgtgtcgtggcatgcctgagaacaatctttttaactgcattcttcacctgtttgatgcagaagtgttttctttttgcgtagaataaataggacagcaactgttaatatggtcaacatttccgacagacaaagtgctagccacgcaccgttcgttcccattgcttcaggcaacaggataaagcatggaataagaaaaacaaatcctcgcaacagggcaaacaaattggcgagttttacattttccacgctttggtaataaccgatgagcatcaggttgatgatgaagaaaacaaatgccagggagaaatatggaaatccctcaatggctatgagcgccgcagtgctgtccggattgacgaacaagcctaccagaatatgcgggaacaaaatgaatgctgccgtcgtgactatgccgcaaacaacggaggtaaataatgcgatccgttttgtatcggctacgcgttttttctctccaagcccgaagttatagctgatgataggttgcgctgattgcgctatggcattgcctaccatgaatacgaacggaaggtaatagcaggcaatgccgaacgctcctactccattatctcccagatatttcatcaatgtgtggttcccgacgaacatgagcgtggccagtgtcgcttcagtcagcaaagcggaagaaccgatgcgacattggcagacaatattaaggagggagaaccgaaaacttctgatgctccatttaataggataaagccgcagtttatgtgcaaatttccataaataaataaggcccgtggcgccgctcgcaaacagtgctatggttgcggcgaaagcagctcccgtcaatccccagcccaatggaaagataaacagccaaccgagtattacggtgatgattgcagcaatgatattgcacatcatagccaacttcggagcgccatccaaacgaatcatgaataggcagacagagcaccacatctggaatattaacgaggggatgaaccacaacaggtattccttaaccatgggggtaagatgttcggaagcgcctaaaaatcgggctgtagctgacggatatgccatcatcaaggcagatggcacgatggcggcaatggtgacgaacaacaaggcctgggtgacattaaggcgcgcggcctccagttttccttttgatagctgaatggaagcgactacggatgagcctacgcctgccatgagccctatcccggtaaacagcatcagcaggggaatgcatatattgatagcggcaatgccatcgcttccgattccgtgaccgacgagtattccgtctactgccgttactgccgatatgctaagcattccgaataaggtcgggataaaatactttctgaataatgtgcatacgtccagtgtgcctaaatcaattgcatttcttttcatatgtgtctgttattcttatggctattttttgccgggaaacaaaaaatgccggataaggtgattggttttacccagtcatcttatccggcatttttatttgccctccgatgaggattacaaaacgcttcttttcgttgtgtggccgtaaaaatagtgcaataatttaggaaatataatttttttatacgtcatgttaataccttggaaaaaatgggatagaaaaaagactgctttccgggcagtctttttaaaacagtttgtgttttgaagggagcgttttcccggcaggctattgtttgcggcctccggattcctgttgttgtgcgggagggattttctgcgcttccggcacggggagcggcgttttctggatggtaacgggcgttcctatgctggtttgcctgtagaggatttccgcaacatttcgcggcaaacggacgcagccatgggaaacaggatgccgccgaactctccctacatgcaggcccagccccgcgttggtaagacgctgccaataaggcatgggagagccgtcaaaacgacctccctccggtatgggatccgtggattcggcattgtagttgatgcatttgccttcggcatcatacattttgccgtagaggttggaagtatggtcttcctttttggagataacggcgtagtcccccgttttggtcggataggcttttacgccggaggagagggggaagtccatggcgaccaagccgtccaccagatactggccccgttgttcgtccaggcagacgaagatttttcgggattttttcggctggcggttcaacaaggtatcgtccttatagacgtcgtacgttttccggtagtccttgcgggctacaaaatgagcgtatgtggaaggatgaaacgggtttttatattccggaacggatttgtccacggcacgcggatccggcagggccgcatggcccgtgccggagtgggaacaggacgcccaccccatgagcaccatggggaaggcggccagaacaaggagaggcttcataagtggtggaaccgggaggattccccggattacttggaacgcggaatcgtcaacttctggttgatgtgaatcagatcggatttaaggccgttagcccttttaagggccttgacagaggtgccgttcctgcgggcgatggctcccagcgtatcgcctttcttcacggtgtaggtgcgggccttgggagcggatttacgggaggagctctttctggcagccgtgctgcgggaggatttgctgtttaccgtgctcttccgcgcggatgattttttagtgacggaaggcttggcggggggattgtaagcgtagctggaagaactttgaaccgggctgtaatggccggattcgtaagcgggatcagagctttccgcgatccacggcgggatttcgccgctggccggttccgcagtgtcgtaaccggccgtggaggaattctgggtggagcaggaagagagggggaataccagcgcggcagcgcaggcgcaggttaaaatgaatggcgttttcatgtgtgccctgttcatactaatttatgatttcggattcaaggcggtagcgcggattgtcgggattttttttcagaccttgcccagattataaaaggtttccgcatttcgggtcgtcacatgggccagatcttccaggttcatgcctctggcagcggcgatgaaacgggctgtatgaatgagatgggcgggttcgttcatgcggccccggaggggttccgggctgagatagggggagtccgtttccagcatgatacggttttccgggcaccagcttgcggtttccgccactacgggggcgtttttaaaagtagccaccccggtgaaggagaccatgccgtccagttcgtcaaagatccgcatggcctgagcggtatttccgatgaagcagtgaaatacgggacgcacgcggcccgcgtagttccgggcaatagccaaggcgtcctcaaagctcgcggagcctttccggtcccgcgtatgcaggacgatattaaggcccaggcgctccgccaggtcaaagtgccgttccagaaggtcctgctgaaggcggtggaattgttccgtttcccagccttggggcgccccgtggaagtaatccaggcccgtttccccgatggcggccaggggaacgtcctgcgccttccggaaaagctggcccgcccagtctgccggggcgtcatgggcatcgtccggatggatgcccagcgcacaaaaaaccgcgccgggaaactggcgcgcccacgccgtgtttgcctcccagtcatccatccgcgcccccagcgtaatcatgcggtcaatgccttcccggagggcatgctggacgtaggtttccctgcgggactggtcgaattgagcggaagccagatggcagtgcgtgtcaataatcatggtgtaagggactgtggcggaacggatgaagtttgtggatatttgccggctttgaaaagtgcaaacgcagagcatgcctgatttttccttgccacgcggaagtgaaacgcacaaactgccccgcatgaaatgtacggctttgtgcatgtgcgccgccctgctgccggtgggcttcctgcaggcaggaacccagcagatagaagcgccgcaggagggctccgttatcagtttccatctggaaaacgatatgttcgtgggggatgatgataattataccaacggcgtccgctttgcgtggatgtccggcaccacgtcccggagccatacgttttccggcatgctgggaacagtgctgggcggcacgaacgcctcggattcctggcggcggttcatgggcatgaacggttccgccaacctgcgccagcagtggggcctggacctgacccagctcatgtacaccccggagcagaaggccacctatcccatctacaaccagcacccctatgtgggcaacctgacgctggggctgacctccctggtcaagaatgaagaccgggccaattccctggagctgcagctcggcaccacgggcacgaattccctcgccaagggctcccagcatttcatccataagctgtggggtatggagcaatggcccggctgggccaaccagctccccggagagatgaccgccaatttgtttttcaagcggtattaccgcctgcgcggactggagaagcgctacggctccggttttgaaacggatgccctggcttactggcatgcggacgccggcacagtaaaggtgcaggcggggggcggcatgtccttccgcttcggctataatctgggcaatacttctccggagaacagcattcgcggcgcgaccagcgcagcgcctcccttcgtttataacaggatgtccgtttccaattgggggtattacggttatattcatgctgccgtgcgagccgtggctcatgacctgtatctggatggtacggtgtttcgttcctcccccaagtatgtgaacaagtatcccgtagtgggagaatggggttatggcttcggcctccggtacaagcgctcggaattgcttttcggcctgcattacatgaccaaggagtacacccagcaggaatccatgcagtgtgtgggcgttctccagctccggcatactttttaacggctgcgtttgcaggccgttcataaacgcaacagcagcttgcaaagggcaagtttgctgttagaattagaattgcggattcgtatgtaacaggacaatccgtttgtgcatatcaactccgacacatattgatttcatgagaacgaccagatcctggcttttatcctgtaccgcgctggcggtaagttccgccatgtgcggcctgggagcaccgggcgattccgcccccgcgccagcccccacagggctggaatgggaacaggaacaaaacctgcatttgaataaggaagctccgaccgcctttttcgcgtctttcagcgatttgcagtccgccttgaaagtgctgcctgaaaacagtaaatggcgcaggtccctgaacggtcagtggaagttccactgggcgaaggatccccagagccgcccggccgatttttacaagccggattacgacgtaaaggactggaaggagattaaggtgccttcctcctggcagactcagggttacggcacccccatttattccaatcagccgtatccctttgaacgctcctggccttatgtaatgaaggagccttccaacaagaattatacgtcctacaaggaacggaaccccgtaggttcctaccgccgcacttttgaagtgcctgcagactgggacggcagggaagtgtacatgcagtttgacggagtggattcctttttctacctctggatcaacgggcagtatgtaggtttttccaaagattcccggaatccggcccgttttgacatcagcccctaccttaagaagggggagaacgtggtggccgcagaggtgtaccgccattccgacggagcatatctggaatgccaggacatgttccgcctgtccggcattttccgcaatgtttccatctttgcgctgccgaaagttcacatccgcgactttttcgcacaggccaatccggtggaccagagggattgggctttgaatattgactatgccaaaccggggaccgtggacggcgattggcgccttcaggtggatgtggatgttcgcaatctgtttccggcaacggaaaagctggacggctgcacggtttccatggccctgtatgactctgccggaaaactggtagaacctgtcaagcccaaggatgcgccatatgacggcgtgttggaaaagcccttgcgcattaccggcatgaaggattttaaaacttccctgctgggcatttattccaaacccagactatggtctgcggaggatcccaacctgtacaccctggtactgacgctgaagcgtgacgggaagacggaagaaatggtttcctcccgcgtgggtttccgcaatgtggtgattaaggacagcgtgttcctggtaaacggccagccggtgaaggtaaagggcgtgaaccgccatgaaagccatccggaaacagggcattacgtgactccggagcagatggaggaagaagtgcggatgatgaaacgcgccaatatcaaccacgtgcgctgttcccattatcccgcggatccttatttttattacctctgtgacaagtacggcatttacgtgcaggatgaggccaacatcgagtcccacggctattactatggcaaggagtccctttcccatcccattgagtggatgccggcccacgtggaccgcatcatggcgatggtggagcgcaacaagaaccatccctgcgtgattatgtggtccctggggaatgaagccggccccggccagaatttccgcagtgcggaaaagatggtgaaggccagggatatgtcccgccccacccactacgaacgcaataatgacattgtggacttggggtccaaccagtatccgtccgtggactggacgcgttccatggcgggcaacaaggatttccccaagccctactatatttccgagtacgcacacaacatgatgaacgccatgggcaacctggcggattactgggaggccatcgagtcttccgaccgcattatgggcggcgccatctgggactgggtggaccagggcttgtacaagaccctgccgaatggagaaaagatgctctgctacggcggcgatttcaacgaccatcccaatagcggccagtttgtgttcaacggcaccatcctgtcggatcgtacgccggaaccgggttattttgaagtcaagcacgtctatcagaatatttccacatctttgacggacgacggcaggatttccattttcaacaagaatttctttacggacctttctccatacgacattacttggaccctcacggaaaacggcaatgtagtggctgaaggcaggttggacacgcctccggccggtcccagagaaaagattgtggttcccattccggacattccccagttgaaaaaccggaaaccgggggtggagtatgccttgcgcataagttacaagctgaagaaggacagggggtgggccaagaagggatatgaattggcctttgaccagctccagcttcccgtgcagggagatctgcctgtgttcaaggctcctgcgggcaaagtcagcctcagcacggacaagcataccgtttccggcaaggatttttccgtgcagtttgacgcggccaccggggaactggcccagttcacggtaaacggcaagcctctgtttaaaacgcccatggcggtgaacgccctacgcgccgcctccagcaatgagccgggcgtcatggccaagagcatggctaacggcctccgtgaactgaagcatgaactgctcagttacgaagccattgataacggcaatagcgtcaccgtcaagcaatccatcaaggtaagcggcaaacaggctgaaaacatcagtggctacggcgataccaagaccaccatcacggccaggaagcaacccctgaacgatacgaacacccatttcatcaataatttggaatggaccatctatgcggatggaactgtcgtctgccagtccgtactgcttccgcgcggcaatcccctggaactgctgcgcctgggatacgaactccagttgtaagcgaatatggacaacgtagcctattacgggcgcgggccggaagaaaactatgcggaccgcaagagcggcatgcctctgggcgtgtataaaacgacagcctgggattctttcttcccgtacggcagaccgcaggattgcggcaaccatgaggatacccgctgggtggccgttacggacgacaaggggaacggcctgcttttcggttccgtgggcgcaccgttcgctttctccgcccttccgtataccaccacggatttgatcctggcaaaccaccccgtggaactgccgaagacgacggataagaccgtgctggttctctcttccgccacgcgcggcctggggggtgcttcctgcggtcccggccctatgggcagggacatcatcaaggccaacaagccctacccgatgtccttctttatgcggcccattaccgccaagtcctacaagggggaaatccgcgtgcctgcggcccggctggatatgaccatgctgacccgcacggacaagtatacggtcaagagcgtaaccagccaggagcagggcgaagcggacgccgaattcgccattgacggtgatcccggcaccttctggcactctgaatataataaaaccgtgaccaaacatccgcatgtactggccgtggacctgggtaaggagcgggaattctccggaatcacttatcttccacgtcaggatggcagcagcaatggccgcgtgaaagattattccgtggacgtgagcacggacggagagaaatggcagcctgccgccaagggctccttcccggacagtgctgacctgcaggaagtgaaattccaggctcccgtcaaggcgcgttatttccgcttctccgcccttagtgaggcgcaggggcgggattacgccgccgtagcggaactggatatcattcccgttaagaaataactcctgcggtttttaccgtttgaacaggcgccccgccgctctttccgagtgcgcggggcgttttattgccgggctccatgggtttcctggagggaaaatgcagaagaagatgaaggatgaacaattggcagaacaaaaaaaccctgtacggaaaatacccgtacaggggtttgatgaaaagggaagcttctatttccgtttacggcgtaccatcagggccgtcaaacccagcaagctcatggtggctgtcgcgggttccgggatcaaaagctggatggtattgttttgcagattgatgtttcccaggatgcattcggtgtagtagtcaagctcgtttgttagagcctgctccttggtcgtaagccacagatcgaacgtctcggtgccggatatatctatattatcgtaattaagcagactgtcgctggatacgtctttaaagacaaaaagagctgtttctccatcctgtcccgtcaccattagataaaccggggatgtcagggaaaaagagtaatctccggacaagttaaatctgccgtcagcgacgccgccattttgctcttccggtatatttgtcaacgcgctggtgaagttgttctgcatgctcatcagatcactgtatttcagttgatcctgtgcatacgaattgccttggaagttccatcggctggtggtcatatcataactccaagtaccgctgctgaaggtgcctaaaatggcattgcctgcattcagcggttctccgagagaattgattagggaatatgcggaggaatcgtcattgctgatattgaaactgtccgctaaggcaatttctccagaaaagagagcgcaggcggtgaaagcattggtgaaaagggagcgatagaacatggctggttatttgttggtttgatgtttgctggacaccgtgatgtaggaaggtgtcttggaagattcgtagtagatggaaaaaactccgctgaaggggatattggaaacatcctctccattgtcctgacgtttccaggaaccgttgttgttgacgaccttgaccatggcatttttgtcatctgcgggaatgttgatgacggcgtcatcaggcaattgcaaagctatttcagccaaagtctgggaaaggggcaggcgagtgtgaagaagggaattgaatgtgggaacgaccagcttctgattcttcagggatacttccccaatgaccacagctgtaacatcggaaccagctttgcgcgtaatggtcaggggttcatggctgaacaccggcatactgccgatattttccgtagatccccttcttctccattcatttccagaataataagcggcaagcttggtggttgccgaattaaagatattaaccgtgtctgcagacatggcggagccgcttttcaggccaaactggttgtcttctccaagaatatcatccagagtgcgcgccttgcgcaggacatataaatcggggggagtgcccttgcttaccagatcagaaagaaggcggtcatccactttaatggaatgctccgtccagctggctcccggttttttccaaccatcccggtttaagggaagagctacaacttcattgccgaagtgaagaaccagcacataggcggagttttcattcatcaggtcgttgaaattaacgtccgggtccgtgatggtgactttattaccggaaatagtaatgttgccttcttcaagggtgtgctgtaccaaggcttccggatgcacccctaaacccagataacccgttgctttggcgtacagggttgtctggatatagccgcagggcgtactgtaagccgtttccgcatgcagggaggcgattgttgccggaagcaacgcgcatgcgcagagagaggctggcagacaatgtaccggattgataaacattaacccattaagaagaaaggaaatcgtttgtcaattaggaaagggggaaacattcccgtttttcatttgtcagacttttccccggatggaggaagctttcaggtttgtccgggggatggccccgggatttgaagcgcaggaagggctgccgccgcttttttcaatgcctccggaacagtaacttccaatggccggacacaggaaaaacaggacggaggcagggtggtagagatacggtgcggaacctggaaggggaaaatcatgaaaaaaagatttcaggaatgcttggcagaggaaggggtggggagagcctgaaaacaggggagaggatttaataaaattttaatgttttttccgggttgttttatttgcgccctgaacgttcttccattaggttgattccaacattcaagccggatatcattccgattcctcttttcatgttttcagaaacgcattcggacagccagcgggcggacaggattctggcctccatccggagggaggaagcccgtcccggccgcggcttgctgaaaatcttctttggcatggcgccgggagtaggcaaaacatgcgccatgctggaggcggccattcaggcggcggacaagggcgtgcaagtcattatcggcgtggcggaatcccatgggagggaagatacgatgcggctcattggcaggctgccgcgccttcccatgaaaaagatggtttaccggggagtggaaatggaggaatttgatttggaggaggcattgcgcgtgaagccccagcttattctggtggatgaactggcgcataccaacgtcccgggaatgcgccacaggaaacgctatcaggacgtggaggatttgctggccgcgggaatagacgtttacaccacgctgaacgtgcagcatctggaaagccgttccgataccgttcacgacattacagccgcccccgtgcaggaaaccgtgccggattccgtattggcggaggcggattgcatccagctggtggacattactccggatcagctgcggacgcgccttcgggaggggaaagtgtacagcgctccccaggcttccgccgctctggatcattttttcaaggagtccaatttgacggccctccgggaactggccctgcgcatcgtagcggagaaggtggaccatgaactgacggaggtgcgtaccatttccggggaccgctccatctggcgcagcggggaacgtctgatggtggcggtaggccccagcccgttttccgcccggctggtacgctggacgcgccgcatggcttatgccctgaacgctccgtggatagccctttccgtggatacgggcgtgcccttgcctcctgaacagcagcagcggctggacgccaatctggaattggcgcggcggctgggcgcggaagtggtcgtgatgcccggttccgatttggcggaaacgctgctccgcatggcttttttaagaaatgtcagccaaattgtggtgggcaaaccgcaggaaagctacctgtggggcctggtgcggcccatatccctggtggataagctggtgaagggaagcgaccagattgatatttacgtggttcccgccgcttcgggaccgggccgtaaccgttggaagagctggcaccggaaaacggagaaagatggtcgggattactggctggccgcaggcgtgacagcggccgtcacgggtgccggcctgctggtttccgcatttaccggttattttgctcccggtttcctgtatttggccggagtagtgggcctgggctttttcatccgttcccgctgggccatgcttctggccgcggcgctgagcgtcctgttgtggaacctgctgtttattcccccggtgatgacgttcaagatagagcggctggaggacgccttgatgtgcttctttttctttttggtggccctttctacgggacggctcacttcccgcctgaggatccgcgagcgggaagaacgggaacgggaaaaaaagaccaatgccctgttcctgtattcccgggccattggatccgcttcggacgtgccttccctcatttccgtcgcggcgggtcagatcagccagattatgggggtgcgcctggctgtcatgacgccggaaggaggcggcggcaagctgaggctttgggagaccggcggagagtactccatggatgagaaggaatggagcgtggcagtctggtgcatggaacaccgccgccccgcaggaaggtttacggatacgatcccggtagcggaagggttttaccttcccatgatgtccggggagcgttgcatgggcgtactgggcgtaaggccggaggaaggggagtgcctgacggccgggcagaaggatttgctggaaagcatgggagcgcagctggccatggcgctggagcgtgaagaattgagggcggaacgggcgcgcacgcggcttatggaagaatcggaaaaactgcaccgatccctgttggacagtgtttcccatgagttcaaaacgcctttggccgtgattgagggcggctgtgaaaaattggccggacgtgccgcgtccgcaccggaggagcgggaagaatacggggaaattttactggccgcgcgccgtctgcgccgcctggtgaagaatttgctggatgtgagccgcctggaatccggcgctttgaaacccaaactggactggtgcgatctgggggatgttattgaaggggctctggctgctaccagggaagcacgccggaatcatcccgtgtctgtttccctgccgccggactatccgctggtgaaggcggatttttccctgatggaacaggtactggtcaatctgctgttgaatgcctgcgtacatactcctgagggaacctctgttacgttgcaaggtggtaccgactccgcgcgcggccaggtctggctggatattcatgacatggggccgggcattcctcccgaacgggcggaaaccatttttgagcgtttccggacgacgcggcccggtggtttgggcctggggctccccattgtgcgcgggttcatggaagctcagcgcggtgccgtctccctggttcccgtttccgccggaacatgtttccggcttgtccttcccctggtggagcacgatagtgttcctgaagagtaattcctcctgcctcatgagcaactttcctgcagatatcctgattattgacgatgaacggcagatacgccgtcttctgaacctgacgctgaccggcgcaggctaccatgtccgcgagtgtgaaaacgggcagcttggcttgagtgagaccgctctgaagcggccggatgccattattctggatctggggcttccggacattaacggcttggaagtgctgaaacagcttcgggagtggactcaggttcctatcctgattctaacggcttgggacagggaggatgaaaaggtggatgccttggatgccggggcggatgattacctgaccaagccgttcagcggccgtgaattgctggcgcgcctgcgcgtgatgcttcggcgcaatcgtccggaccgtgagccgtccgtattccggctgggtcccattgtcgtggatctgagttcccggcgcgtggagaaggggaaagaggaaattcatttaacctccaaagagtacggaattctgcgcctgcttctgctccatcagggcaaggtgatgacccaccgccagctgctccgtgaaatttggggcccccagcatgaggaggacacgcactacctgcgggtgcacattgcccacctgcgccaaaagctgggggattccgatccggaaaaccgcattatccgtgcggaatccggcctgggttacagaattgtggcggatggagccgagtagcccttgtcccagttttactgggctggaaaaaatagcggcacattatctgcggcagccggaaaatatattttttcataacggttggagaatgtagcttaacttcacgcagtccaacatgctgtgtaggatccaagacgtattcaatacgtctttatgaagatcaagtacaacgcaagaaacgtaggagccgcagccctgggctgcgccatgatagcaggaaccgtctgcgcaggagaggaaacggtttctccgtcgatagcctccctgacaaacatgcaggaggccgccataccttccacagacatggattgggccttttccttctcggcggggtggtccagtaagtacgtaacggaaggtctggactgcctgccgggcagcggcatctgggaagtggctccgagcatttcttggaagaatcttacgttcagcgcctggtatgccggaggagattccgccaattacgatgaactggacctagttctgggttacgcctggaatctggggaagtggactgtcaatccctggtatgagcaccaattctattttacacaggattataatgtggccaatccggcgctgacggtctcctatgccgtaacggattggatggctgtaggagcggaaacccaggtgaaagtggaacaccaggattttgaagcctattacagcgcctttgtgcggttggagtggtcccccctggaaaatgtgaccgtggttcccatggtcaggtacgggtacaacggcggttataacgtggactatgatgacggctccaactgcattgactggagcctgggcgtgacatggcggtttgcagaacattatacgctttccggctccgtcaattattcccaggcggctacggtgctgcgtcacagggatgccggagacgaattctgggtgggattccgcctgggcgtggagttttaacggcgcaccggcgttaaaaaacgggcttccggagaggaattaataatttcttaatgtccggaggccctttgttaactacccggaatttccagaatatgcgtagagttgcgttgtgtcctcgcacgacttgttaatcattgtcctgttcataggcatactggtctctttcaccccgtttctcggaaaatggctggcaagtgttttgatgggaaggcagacatggctttccccggttctgggtcccgtggagcgctgcgtctaccgtatggccggagtggaccccacccgcgaaatggactggaagaagtatttgacggccgttcttttgtttaacgccgctggattcctcgtccttttcctttccctgctgtgccagaaatggctgcctctgaatcccgccggaactgaaaatatgcggtgggatatagccttgaatacagccatcagcttcgtgaccagcactaactggcagttctattcaggggaagggccggaaggcgtcagttattttgttcaaatgaccgggctgggcgtgcaaaatttcgtcagcgccggtacgggaattgccgtcatgtccgccctgatccgcgggctggaaaggagatgcgcttctactctggggaacttctggacggatctgacgcgcagcacgttgtattttctggtccctgtttccacggtcattgctcttctgctggtctcccagggtgtggtgcagtcctttgacggacccattgccgtgccgggcatggatggcgtggaacagatgatacccagtggcccggcggcatcccagatagccatcaaacagctcggagcaaacggcggcggctttttcgggaacaacagcacgcatccttttgaaaaccccacgcccttcagcaatatggttgaaatgctctccctgcttctggctagctgcgcctgcccatacgcctatggcgtcatgatcggaaaaaagaggcaggggtggattatcttcggagccatgatgattctgcttgtggcggccattgtcttgtcccagtgggcggaacatgcgggaaacccgcttttcccgggcatggaaatgctggaaggcaaggaagtgcgcctgggcgttacgaacagttccctctggtccgtcgctacgacggcatcttccaacgggtccgtgaactgcatgcattccagcatgtccccgctgggcggcgggattgccctgttcaatatgctgctgggtggggtaattttcggaggtctgggctgcggcttgtacagcatgctgatgtttgccatgattaccgtgttcctgtgcggtttaatggtggggcgaaccccggaattcctgggcaaaaaaatgggaacccgggaagtgtgctgctccatggtgggcatccttctgcccggcatggccgtcctggtcatgagcggcctggccgccgctacggaaaccgggcgggcatccatctgcaatgctagcccccacgggctgacggaaatcctgtactgcttcggttcccaggccgggaataatggaagcgcctttgctggtctggctgcaggggatacgcctttttattccctgctgggcggggtggcgatgctgctggcccgcttcggaaccattatttcggtgatgatgattgctggcagcatggcatccaggaaaaccgctccaccggcccagggcaccatggggacggataacctgatgttcatggttctgctggtagccgtcgtgctggttgtaggagccctcaccttcttcccggccctggctttgggacctattctggagcatttgctcctgtattcgggagccatgctttaaggcgtattagccgataatccggatatttatgatcatgaaggagaaaaagagtcaatcctggtatgacggagccatgttgaaaacagctttcctgaatgcgctgcgcaaatttgacccgcgcgtcctgtctaaaaacttcgtgatgtttatcacggctgcaagcgccctgatggcaacgattgcccttatcagggatttggctgccgggcaacccttcggctttactttgcaaatcgcgctctggctctggttcaccgtgctcttcgccaactttgcggaagcgctggcggaaggccggggaaaggcgtatgcggacgccctgaaagaaatgcgcgtttatgtgaacgcccgtttgctgacggacaagggaacggaggaaatcgtctccgtttccgaattgcgcaaaggggacaaagtgttgtgcgaggccggggatatcatccccctggatggagaggtgatagaaggcatcgctagcgtggatgaatccgccattaccggggaatccgctccggtcatccgtgaaagcgggggggaccgcagcgctgtaacgggaggaacccgtgtaatcagtgacggcattgttatccgtattaccgtggaaccgggccatacgttcctggaccgcatgatttccatggtggagggggccagcctacagaaaacgcccaatgaaaccgctctgggtatcttgctggtggcgctgaccattgtttttcttgccgtggttctttcccttcccgccatggccggatacattgaggattctgcccgggcgcttggcttcagggcggagggccgtatttccctgcccatcctggtctctcttctggcatgcctgattccgacgacgatcggcggattgttaagtgccgttggtatcagcggcattgaccggcttgtgcgccggaatgtgctggctgtgtccgggcgcgccgtggaagtagccggggacattgatgtgctgatgctggataaaaccggaaccatcaccttcggcaatcgaatggcgaacgaattcctgcctgcacccggggtggatgaccttcagctggcggaagccgcccagcttgcttccctgtccgatgaaacgccggaaggccgcagcatcgtggtgctggctaaaaaacagtttggaatccgaggccgccatatggacgcggaccatattgtttttatcccgttttccgcttccacccgcatgagtggcgtggatattgcggagcacgacggccgtccggccgtttccatccggaaaggagcggcggaaagcgtggcgcagtgggtgaaaatccggggcggaactttcccgcaagaggtggaaatgatggtgcagaatgtcgcgcgtgtcggcggtacgccgctggtagtggcccggggaaaagacgtgctgggggtcatttatctgaaagacatcgtcaagggcggcatcagggaacgctttgcccggctccgggccatgggcatccggactgtcatggtgacaggggacaatgccctgactgccgcatccattgcggcggaagccggcgtggatgacttcatggcagaagctacgcctgagatgaagctggcgcgcattcgtgaggaacaggctgctggccgcctggtggccatgaccggggatggaactaatgacgctcccgccctggcccaggccgatgtgggtgtggcgatgaacaccggaacgcaggccgcccgggaggcgggcaacatggtggacctggacagcaatccgaccaagctgattgaaatcgtagaaatcggcaagcaaatgctgattacccgcggcgcgctgaccaccttttccttcgccaatgacgtagccaaatactttgccatcattcccgccatgtttgccggcctctttgtggctgacggcatggccagtggacctctttccgccctgaacataatgggcctgaattccccgcaaagcgccattctcagcactgtgatttttaatgccctgatcatcgtagcgctgattccgctggccttgaagggggtttcctaccgtccagcgggagcggcctccctgctgaagcgcaatatcctcatttacggggtgggcggcctgattgctcctttcatgggcatcaagcttattgatatggtcatcaatgcatggcgccttgtttgaacaatccaatcctaacctgctgaattatcatgaagtggacatttcccaatctgcgcctgtttctgtttctggccgtcattaccggcggcatttaccctttggccgttacgctggtcagcctgatttttttccctcatcaggcgcatggttccctaatccggaatgaacggggggaaattatcgcttcggagcttgtcgcacagccttttatctccgccaaatatttctggccccggccctctgccggagaatacgctaccatgccttccggagccagcaacctctcctggacttccgggaagctggtcagaacggtggcggagcgcagggcggctctgctgaaagcccacaacctgccggagaaaacgcctgtccctgcggacatgctttttgcttccggcagcggtttggagcctttcatctctccggaagcagcggaattgcagttgaaccgtgttgcctccacgcgcggagtacctccggaaaaagtccggaaactggtgtctgcacacttcgtccggggtggaattctgggggaaaacgtagtcaacgtgatgactctgaacgccgcgctggatacattgttcccgatgagcgggatgtaattgaccgccccggtccggaaaatatcctggcggaaaaatcgtccggcatcagccggtgccttggttccgcgtctttctccggttaccggggcggttttcttattggatttttgtcagtttggcctaatctgttgaaaaacagagacaacaaattggtcggcgttcggtatgctgccggataatcctttcagaatgcagcaataggggggcgacatcctctcgttagttttattaggctgatatgaagtttcttcagccccaaatgcggctgtttacaaatagtcctcccttggcggtgtgaacacatcgacaacctctccgctttccatcacctcaaaggaatgaggcgtattgcccggtatggcatagctgtcccctgcatgaagcagcacttcaatattctcctccggcatttccatgttcaggcggtattcgcctgaaatgacgtacccgcattgttcatgcggatgttggtgggtggaggcgaagttgcctttcacatagttcatctttgctaccattgatttctctccgacagcgagcgaatccagtgaaacgcccttgaacactttcttcgatgcgtcttccttgcgaacgatgattttattattttttatgatttccatatcaatacgttatcttcagttccatctggatgtttccgcgttcgtatgccgggtgattttccgcaagttccttgaatcccagctttttatatgtatgtatggcaggcttgagcagggtgttgctttcaagaaaaagaattttcgccttcatgtcctttgctttgtctatggctgcatggcaaagtatttccccgatgcctttgccctgcgcatgagggtgaacggcaagtttcgccagttcataatcatataccgggtcatccattttgcagagggcacaaactccgacgggcttccccctgtaaagggctacaaagataaagcctcctttgttgataatatattcctgcggatgatcaagatagtccagatcgtgcggttctatcttccaatgttttgtaatccactgtacgttaagtgatttaaacgtatttttgtaacacggttcgtaaggaactaccctgatatgctccctttccctcattttccgggcttctttgacccgttgcagcaggctcttctcagcgagccggtcttcccattcgccgatagctctccacaaatcatggcgcgtttccttggaaatatcctctacggcgacctccacgtctttgcaaagctctgtcagcatggcggcgaccctttttccatgtggagccagggcgatgacggtgcgtctcttgtccttctggtcttcaaggcttttcaccaatcctcttgccgtcatttctccaacgatattgctcacggatggatggctgtgccctatttccttcgctatgcccgttattgttttctctttcccgtcggccaaaacgaaaagcaggggaaaccactttggctttatgtcaatgccgtataattcataaatttgacttgcatcagacgtcacagcatccgtcagcatgcgcagcctgcttccaatggctattttacctgtcctatcgaaaaaatccatatctttccgttattgaatacgtaactgattacgtaactaccatgccattatcatgcgagcaagcattttttcacattttagttttcttgcaggtggggaatatcgctgtatccatcaatggaatggaaaaatccgtcttctgtcagtcgggtaggccgcggacgtggtatttggcattgccgcccttgcccacgcgattattttggagcatgggcaagggctattcctgcatttctatccggtacggggctgccgttctttccggaaatattttccttggcgttcagaattttacactgttgccgggataccggatgcgccagccccatgggaaagcgggacaggatttccttgtcagggcggactctccaataacccgttgagcgtgcaagtgatattgcggggaatccggaggggcaaaaaatttttagataacaggaaaaatcctgtttttccattcaacggttggagttattcttatgtctaaaataccaacataccatgcttaacaatctaacaacaaaatttcaggaagcgctgatgcaggcgcagcaaactgcaggacggcttggaaaaccggaaatctcctctctggacgttctggtggcgttgctggagcaggaaggcggaattctttcccctattctccgcaaggcctcttgcgacccggggttgcttctccaggcggcccagagggaagtttcccacgaacctacccaaagcggtgccaccacccagccccagatggggcgtgacctggctacggtaatgcaggctgcggaagaagaacgcaaaaagctcaaagatgactacctcagcgtggaacatttcatgcttggtgcgctggatacgcaaaacaaagtgcaccagttgacggacacctttggcctgaccaaggataattatctggccgccatgaaggaagtgcgcggcaaccagcgcgtgacggacgacaatccggaaggcaaataccagacgctggaaaaatatgggacggacctgacggcccgcgcccgtgccggtaaaattgaccctgttatcggccgcgatacggaaatccgccgtgttttgcagattctttcccgcaggacgaaaaacaatcccgtcctgatcggggaacccggcgttggcaaaaccgccattgcggaaggtttggcgcggcgcatagtcaacggcgacgtgccggaaagcatgcgcaacaagcgcattgtttcgctcaacatcggatccatgctcgccggggccaaatatcgcggcgaatttgaagagcgcttgaaatccttccttaaggaagtaacggattccaacggtgaaatcattctatttattgatgaactgcacaccatcgtaggcgcgggcgccagtgaaggggcggtggatgcgtccaacctgctcaaacccgccctggcccgcggggaactgcggaccatcggcgcgacgacactggacgaatatcgcaaatacattgaaaaggatgcggctctggaacgccggtttcagcccgtcatggtctccgagcccagcgtggaagataccattgccatcctgcgcggcctgaaagaacgctatgaagttcaccatggggtgcgtattacggacgctgccatcgtggcggccgccaccctttccgaccgttatatttccgaccgttttctgcctgacaaggcagtggatctggtggatgaagcggcagcccgcctcaaaattgagctggactccatgcccacggaaattgaccagattgaacgtgaagccatgcagcttgaaatggagcggcaggcgctggcgaaggaagaagacgccgacagcaaggcgcgtttggaaaaaatcaccaaggacctggccgatttgaaggaaaaatccggttccatgattgccaaatggaaaagtgaaaaggaagtgctggatgccgtccgcagggaacaggaaaaaatagaagccctcaagctggaaagtgaacgggccaaacggatgggtgatctgacccgcgcatcggaaatcacctatggcgaacttccggaggcccagcgcgccctggcggaaggcaaggaaaagctcagtaaaatgcaaaaggaagatggagggctgctgaaggaggaagtcacggaaggagacatcgccaaagtggttgccacctggaccggcattcccgccgcccgtctgcaggaaggggagcgtgccaagctggtgcacatggaagaacgcctgggcgcccgcgtaatcgggcagaaacaggccgttaaggccgtatccgacgccgtgaggcgcgcccgcgccgggttgcaggatgaaaacaggcccattggctctttcctgttcctaggacccaccggcgtcggcaagacggagctcagcaaggcactggcggaattcctttttgacaatgaaaacgccatcgtccgcattgacatgtccgaatacatggaaaaacattctgttgcgcgcctcatcggggcgcctcccggatacgtggggtatgaagaaggcggtcagctctctgaagccgtgcggcgccgtccgtactgcgtggttctcttcgatgaaattgaaaaggcccacccggacgttttcaacgtattgctccaggtattggacgacggccgtattacggacggccaggggcgtacagttgacttccgcaacacggtcatcatcatgacctccaacatcggcagccagtatatcctcaatgaagccaatgcggaacagcgggaagccaaggccctggaggcgttgcgaggccacttccgtccggaattcctgaaccgcattgatgaaatcatcatctttgaccggctcacggcgcaggaactcaagggcattgtggacattcagcttcagcgtgtccgcaggcgcttggaagccaaaggcctgtttttgcgcatgactccggaagctacggctctggtggcggatcacggttttgatcctgtttatggagcccggcctctcaagcgggccatccagcatgatcttctggacccgctcagccttaaacttctggaaggggacttcccggaaggaacggaaatcgtggtgcgggaaaaaggcggcaaattggacttcaccaaggagaaaaaataactgaaaagcatgcttgccggtgtgttgccgggagcggacaggggcgcggcgttagctgcgcccctgtttattgctccaatggtgcggaaaggccgcgtatggaatctgcgcactcctatttcttcttctcggaataggcacggtttccgttcaaatctgcgctgagccggaatattccggcataacgaagtagaaattgtggaaagaactcggcatatcagggctgccttcatcagtttgggaacccggctacggaatcgaggcttccttgcaagtggcggagattgtctgagtttttctcgaagaaaggtagggtacaagagtagggaagagagggacgttcaaaaaaagatgcggtggaaagaggcagtatgacaaaagcatatactgttcatgatatgtaggttatgtgggtattgaggggatggcgggaataagcggacgcaaaaaagagcacgaaaaaaattgacaaaaaggtgtggtatgatagatttctcggcacgccaacacggcgacgggatgaaaagcccggcggctgaagggctcggaagagtgctggaagcggctggagccagccacccggagaaaaccccggaaggggttgcgataagaagatttcaagggaatgactaccgaaaccgccgagggttttccgagggtgccgagaggtgtctgaggggtaaaagcccgaaggagcgacctagctctgagaggggtggtttggtagaagcaaggggaaagaaaaaaggtcgtgacgcgcgccgtgcgaggcagagcgaagaggtcttcaagagacacaacttgaaggaagagctggctgaagcatggcgcaaatgaaatcgcaagattccatttggtccagcaatttcaaaaattaatttgatggagagtttgattctggctcagaacgaacgctggcggcgtggataagacatgcaagtcgaacgagagaattgctagcttgctaataattctctagtggcgcacgggtgagtaacacgtgagtaacctgcccccgagagcgggatagccctgggaaactgggattaataccgcatagtatcgaaagattaaagcagcaatgcgcttggggatgggctcgcggcctattagttagttggtgaggtaacggctcaccaaggcgatgacgggtagccggtctgagaggatgtccggccacactggaactgagacacggtccagacacctacgggtggcagcagtcgagaatcattcacaatgggggaaaccctgatggtgcgacgccgcgtgggggaatgaaggtcttcggattgtaaacccctgtcatgtgggagcaaattaaaaagatagtaccacaagaggaagagacggctaactctgtgccagcagccgcggtaatacagaggtctcaagcgttgttcggaatcactgggcgtaaagcgtgcgtaggctgtttcgtaagtcgtgtgtgaaaggcgcgggctcaacccgcggacggcacatgatactgcgagactagagtaatggagggggaaccggaattctcggtgtagcagtgaaatgcgtagatatcgagaggaacactcgtggcgaaggcgggttcctggacattaactgacgctgaggcacgaaggccaggggagcgaaagggattagatacccctgtagtcctggcagtaaacggtgcacgcttggtgtgcggggaatcgaccccctgcgtgccggagctaacgcgttaagcgtgccgcctggggagtacggtcgcaagattaaaactcaaagaaattgacggggacccgcacaagcggtggagtatgtggcttaattcgatgcaacgcgaagaaccttacctgggcttgacatgtaatgaacaacatgtgaaagcatgcgactcttcggaggcgttacacaggtgctgcatggccgtcgtcagctcgtgtcgtgagatgtttggttaagtccagcaacgagcgcaacccctgttgccagttaccagcacgtgaaggtggggactctggcgagactgcccagatcaactgggaggaaggtggggacgacgtcaggtcagtatggcccttatgcccagggctgcacacgtactacaatgcccagtacagagggggccgaagccgcgaggcggaggaaatcctaaaaactgggcccagttcggactgtaggctgcaacccgcctacacgaagccggaatcgctagtaatggcgcatcagctacggcgccgtgaatacgttcccgggtcttgtacacaccgcccgtcacatcatggaagccggtcgcacccgaagtatctgaagccaaccgcaaggaggcagggtcctaaggtgagactggtaactgggatgaagtcgtaacaaggtagccgtaggggaacctgcggctggatcacctcctttctatggagcaagtgcacggaagtgcacaggtcggatctcttcccgaggggagagaaagcggaacccgcgagggcccgcaacgaaccaaagatgtgtaaacagccagacgcctagagcgaaacctggcacgacgtgcgtgacgaccttttttcaccgagaaccgcaactgggggtatagctcagttggtagagcgccagctttgcaagctggatgtccggggttcgagtccccgtgcctccaccagtttcgggaaagagacccaaagccgggcctgtagctcagttggttagagcacgcgcttgataagcgcggggtcacaggttcaagtcctgtcaggcccaccagcaaaatcgattattgagggaaagcgaaaattgacatctgcgtggcaaagaaaacgattgctgagaagcaatcgctttccaacaaagtgggtagttgaacaacaactacaaaacacaagataaacatgcataccaagcaatgagacaatacagtaagtcacgaaagggctttgtggtattgtggaagtggtaacagcttttgcaatatgatgaagtaagtaagggcgtacggtgaatgccttggtgccaacaggcgaagaaggacgcggcaagctgcgaaaagcctcgggaagctgcaagcaagcgatgatccggggatatccgaatggggtaacctgatcgaggcaatactcgatcgttcatacctgaatacatagggtatgaaacgcgaaacccgctgaagtgaaacatctcagtaagcggaggaaaagaaagagaaatcgattccgtaagtagtggcgagcgaaagcggatggagcccaaaccgaaggtattccttcggggttgtaggaccacgtcatattcgaccatactggatagtagaacagcctggaaaggctggccggagaaggtgaaagccctgtagacgaaatccagagtgggaattagtggtatcctgagtaatacatcacacgtggaacgatgtatgaacccgcgcggaccaccgcgcaaggctaaatactagttggcgaccgatagtgaacaagtaccgcgagggaaaggtgaaaagaaccgctgtgagcggagtgaaatagaacctgaaaccgtatgtctacaaagtgtcagagcagagcaatctgcgatggcgtgccttttgtttaatgagtctgcgagtcagtgtttgtggcaagactaagggcttccggcccggagtcgcagcgaaagcaagtccgaacagggcgcaataagtcgcaggtactggacccgaagcggaggtgacctacccttggccaggttgaagcatgggtaaaaccatgtggaggaccgaacaggtgaacgttgaaaagttctctgatgagctgagggtaggagtgaaaggctaatcaaaccccgtgatagctggttctcttcgaaatgcatttaggtgcagcgtcacgtgctgatgcgcgggggtagagcactgacaaggctagggggcacacccgcttaccaaaccttatcaaactccgaataccgtgcaatggaacgtggcagtgagacagtgggggataagcttcattgtcgagagggaaacaacccagaccagcagctaaggtgcctaaataacgctcagtggaaaggatgtgggattacacagacagtgaggatgttggcttagaagcagccaccatttaaaaaatgcgtaatagcttactcatcgagtgatcctgcgccgaaaatgattggcgatcaagcgttataccgaagctctggactttgccgcaaggcagagtggtagaagagcgttgcatgcgcgtcgaagggcgatggcgactgaccctggagcacatgcaagtgagtatgcagacatgagtaacgttaagccgggtgaaatccccggccgccgtaaacccgaggtttccagggcaacgtgtttcgtccctgggttagccgggacctaagccgaggccgagaggcgtaggcgatggacatcaggttaataatcctgagctcgcaacccttaaactggggggacgcatgagaaaagatgactaggttattgaattccgagttgagtccacggactcagcgcatcattggatcgagtgccaagaaaagccccagcgtatgctaagcgacccgtaccgcaaaccgacacaggtgggtgggtagaatataccaaggcgtaagagtgaaacctggttaaggaactcggcaaattagccccgtaacttcggaagaaggggtgcctgcagcgatgcaggccgcagagaaatggcccaaccgactgtttatcaaaaacacagcactctgcaaagacgcaagtcgaagtatagggtgtgacacgtgaccaatgccgaaagattaaggcaaggggttagccgcaaggcgaagctctaaacccaagtcccggtgaatgtcggccgtaactataacggtcctaaggtagcgaaattccttgtcgggtaagttccgacctgcacgaatcgtgaaacgagttgggcactgtctcaaccaggcgctcagtgaaattgtagtggcggtgaagatgccgcctacccgcagaaggacggaaagaccctatagaccttaactgtaagctgtcattgtttcttcggttttaatgctcagagtaagtgggagacgctgaagacgccctttagggggcgtccgagtcatcaatgagacaccaccctttgaaactggaggatctaaccctgagccgtgaatccggccagaggaccgtgtcagccggtcagttttactggggcggtatcctcccaaagagtaacggaggagcgcgaaggtgggctcagcccggttggcaaccgggtgtcgagtgcatgggcataagcccgcctaactgtgagaccaacaagtcgagcagatgcgaaagcaggcccaagtgatccggcggtagaaagtggaattgccgtcgctcaacggataaaaggtaccttagggataacaggctgatcacgcccaagagttcatatcgacggcgtggtttggcacctcgatgtcggctcgtcgcatcctggggctggagaaggtcccaagggtccggctgttcgccggttaaagcggcacgcgagctgggttcagaacgtcgcgagacagttcggtcctctatcctctgtgggcgttggaaaattgaggggttcagaccttagtacgagaggaccgggtctgacgcaccactggtgcatcggttgtactgtcaagtgcatggccgagtagctaagtgcggacgggataagcgctgaaagcatctaagcgccaagcccttcccaagatgagttttccctacaggttcgtggaagaccaccacgttgataggtcgcaggtgtaagtgcagcaatgtattgagccgagcgatactaattaccaattgacttcatcatattacatcactccccgtcgtgaatgacaacttgctcttgtctcatttacctgtgcatgttcatcaaccaccagccacgcagatgtcagtttacgctgaatccctccccacacaaaggacggaaatcttcttagccgccacacacataccctgaaaaaaatccctcactcagaagcccccaaaaaagcagggctcccgggcaggcaggatgaagaaaaaatcacctcttccccctgaagcccggtggccagagcgcagtggtcccacccggtcccgttccgaacccggaagtgaaacgctgccgcgccaatggtagtcggacgataggtcccgcaagagtaggtcgccgccgggatttttttccatcaggccccgccagtcatttgactcgcggggcctgttcttttcttgctcggtcatattttccactttaagtttggttatgtgatctgttgctatcttcctcgaacgttcaggagttgtccgtagggaaaaatggttgctatacttcatgaggctgccatgtctgcgtatttggtcccggaaccggcgacggcttcccggagcctgctgggtttggcgggactggccatgcggaggcgcagaaggcaggaagcctgatagaggcgggaaagggaagcaaaaaactgcccatgcgcctctgcgtcattattttcagaaaattgtttgaagaaacccgggagaaaatgattcttccgggttttctttttcctaatgattcctcggaaaactttgaatggggttttaagactgctggtcttttcctacatctccctgttcatgctcctatgggtaatagttgacggttgaaaaagaaaattccggcagctatagtcgtccctaggcaaatgcaattcaaatgattcgttttctatcctttttatttttcctgtgctttttttccgtgtgttctgcaaaagaattgaagatttttttgctgacgggccaatccaattctctgggggcggtgaagggcagccctgcttctccggagctgttaaaaaagtatgaaccgaaggagactctgtactggcatgaaaattttgggcaaagggaaggcgtgtttcccggcgcttccacatcctgggagcaggtaaggcctgctatgccgcgttataacggcaatttatgcatggggccggaatacgggtttgcctttactctggagaagaatggatggttcaaggatgcggacgttgcggttgtgaaagcttcccgggacggcggcgacaattcccattggcggaaaaacggccaggcttacaggacgctggtgcaggccgtcaagaatgcctgtgcgggtgtggacaggtccaagtattccaaagtggagtttgccgggcttttgtatttgcagggggaaagcaatgccggaacttccgttccggagagcgcttcccgctttctggaacttctgggcaatctggcggcagatctgaaaccgtacggggatacatctgcactggccgcgcagaaagccgtccttggagaaaatgccaattgggccggaaagaatgaatctgatccggaaacgggtaaccttaccggcggcctggaaggacgcgatacggaagttcagggaaagacaacccgccaggtgatgaaggatctggcggaatcccgtccatccctgggctatgcccctacccgagatcttcccaaactgaccgcaggagatcaaatgggagtgcattacagcggccagtctcagatcagcataggagcccgttttgcttatgaagccgcccggctggccgggaaggataccggctccgtgcgaagcggtcgttacgatcttcctctgggttctccggacgcgtggatgaaccggaaaatgccggggaagaacgtatgtgtgtggaatgtggcttcttccgtaaaacccagcctggtgtcaggggggtgaagttgtttggaatccgtgtggaggatccggccgtcaagactgttatcgtccggagtaagggaagttccggagaccgtttggtaatcgggccgggaggtattcgcctggcggaggggaaaaatttgcagttgaggacgaatgtacagctggcgggccggcagtcctggaatattccgggtggttctaccgtggagattaagccctcgccggttcaggaaaaagccatgcctgtccgtttgtccggccaggcggaggtgcatgtaacccaagcggaaggcggcggagaaacggtggaagcggcccgcgtcgtattggaacaggtgctgccctctgccctgaaatgttcctggacgttgtccggaaaggtggagatgactttgaagggtatggaggggaaggccgtgaatttgggcaaagtcttcgtcaagcagggcgctgtgctgaatctgaatggctccagacctgttgcgggcagtgtcgttaatcaaggcggcacggtgaatccgtaatcaatagacctggtacggtccggaatgcttgccgtattttttagtggaggaaggaggttaaaaaatacgttttttcctaccggaagggccatgggcttttttcttattcacaggagcggagcggcctggaaaccgaacaggggcatgacctgcggcattttcaccccggtttattcacaggaagttctgcttgggaagcattgatcatcaagtctactgtactatatttggcgtactttttcctttatggatgcgttatgtagtagtatggtcgcgccatgagatgcgttcagtgcggtcatttggaagataaggtcatcgactcccgtatgtccaaagacgggacgaccattcgccgccgccgcgtgtgtttgaggtgcgattaccgttatacgacctatgagcagattgaacgcacggagttgcgcgtagtcaaaagggataatctgagagaagccctgaatcgtgaaaagattttacgcggcctggtaaaggcgtgtgaaaaaaggcctgtcagcatggatcgcctggaccgcgccgtggaagagatcatttccgaattgcaccgcgaccatttgcgcgaagtcccttccagcgagattggcaagaaggtgattgaaaaattgtatgccatagatcccgtggcttatatccgctatgtgtccgtgtaccgccagttttccaatgtggaggagtttatccaggagattacgcagatgcgccaccagacgcttattgatcccctgcagcgcaagcttcccattctttaaatttcctgttccatgatcggcttccgaaacaacagaccgttgctcaagcttggtgattgcctgattaccgagtacggggaacaatggctggcggatgctttggagcacgctgcccggcgtgccggaacaacccttccgttcaaggaagacctgctggcttccgtgcgttattatctggagcatgagtgcgatttgtccgtcatgaaggtgtccgagctgtatgcgcgtctgcgccgcatgctcacggaagtgggcctggaacaccttgcaagggagcttagggaggagatgccgcccatgacggtctgcgtcgcggagattgcccgcagcgtgccgttctggctgttttttgcctgcgaactgaaaaagcaggtggaggaattgcgggggcatggcattaccaggtattgcttcacaggcaggaaggaatgcgtgatggctctccggggaaggaagcgctgggaccgttcctgccagtctctgctggaagatctggactttcttctttcccgctatgaggagcaggcggcggattattaacgggacttatccgtgccgtattggagtattcagctgcgcaattcaacaggttccgctttcccgactgacggagcctgttcggagtgcagcgcgtttctgcttttcgtgagcatgcgaggctatttcactttaccgggaacgggcttgcggggcccgttgatccatgctcgggcatcctgttttgccggaaggcccaataagagttaacaggccgtattgtgccgcctgattcccggagatgagccggatgagggaatgcaaggggccttccctcattttccccgaggttgttatttctggctgtttgcagcaggagcagcctcacccgtaccggaaggccgtgaataaggcagagtgaggtcttgctccctgaccgcacggggggatggccgccgttacaggtgtttgggcgcggggccgttgatgattttgcgggcccggttcagggcggcgtcaatattctcgcagatattgtagcgtttcagctcccggtaaaagggcgcgtggcggatgacgtccagaggctggggctgcacgccgcaaaccagcagggtggaaccgtgttcccggcactggtggcagaagtcggaaaggacgttcaggccggtggcgtccagcgcgggaaccaggcgcatgcgcaggataaccaccttggtatcatgttccagcgtttccagaacctggtccttgaattgctccacggcaccgaagaagaagggacctttcacgtcgaaaacttccacaccttccggaatgtccagcttggcggcggagcggtttccatcatcttcctcatcattttccagcagttcgtttttgatggcggaaacatcgctgatttgggccatgcggcccatgaagagcagggcggccagaaccacgcctacttccacggctacaacgaggtccacaaacacggtcagcaggaaggtgattaccagcaccgccgcatcctgcctgggccctttcagcagacggctgaacgtgtgtatttcactcatgttgtagcatactaccgtcagaatgcccgccaggacagccaagggaatctgctgggcatagtgggcaaaggccatcagaatggccagcagggtcagggcgtgaatcatgccggaaaccgggcttttagctccagccttgatgttagtggcggtgcgggcaatggctccggtggccggaatgccgccaaacagggcggagccgatgttgccgatgccttgtgcaatcagctccatgttgggcttgtggcgccctccggtcatgccgtccgccacggaggcgcttaacagggattcgatcgccgccagcagcgcgatggtgaaagcaggggctgtcagcgcccccagggtgctccagtcaatgctgggcagggagggcagggggagtgtattcgggaggctgccgaaagcttgcccgatggttgtcacaggcaacgaaaacgccacggaaacggccgtcatgcccagcatgcccaccagcatggccggtattctgggccagaagcggcggctcagcagggtaatgattacggtgccggcggccagccccagcgccgcccagttgatggtgtggaagtaatggaagtaacacgcccatttttcaatgaactctccgggaattttttccgtgatggtgaggccgaagatgtctttaatttgcgtggaaaagattaccacggcgatgccggaggtgaaccctgtggtgacagggaatggaataaagcggatgagcgcccccatgcggcagaacccaaagatgatgaggaagaggcccgccatcaatgtgcagaccagcaggccggatgcgtggtattgctccaggacgcccatgataatgatcacgaaggctccggtggggccgcctatttgatatttgctcccgctgaacagggaaatgaggaacccggccacaatggcggtgatgaggccctgggttggggagagtccgcatgcgatggcaaaggccatggccagcggaatggctactacaccgacggtcagtcccgcaaaaaggtccgccagaaaggtttgtttggtataagttttgagagaggaaagaagagcaggtttgaacatggctgccgggatggttggctagctgcggtggaggccgccagcggcggggttgaagcgtccccttcctgcacccggaggcgccccgcggagacggacggcaggctctcttcgttcccgtccgcctccgcaggcggcgttacttggaaaggatgccttcccagtaggcgatgcggcggcgggtgttgtcggaattgggagcccccgggttggtacgctgggcgaaggcttttgtcaattcaaatacgtcgcgcgcgtctgttccatatgcatttgaaatggaggcgaattgttcatcgctcagcttgttgagcggcgtacccgtggagatgctcatggcgactgccttcccgaccagctcatgggccttccggaaggggaccccgcggcgcaccagataatccgccaggtccgtggccagcagcatggggtcggacgccgcttccctggccctggccgtgttcaccgtcatggcggctatcatttccgcattgacgtccagggccagtttaaccgtatcaatggaatcgaacaggggttccttgtcttcctggaggtcgcggttgtaagtcaggggaagccctttgacagccaccatgacggcggtgaggttaccgtacagccgccccgtttttccgcgggtgagttccgcgacgtccggattttttttctggggcatcagggatgaacctgtcgtatgggcatcggacaaggaagcgaagccgaattccgccgtacaccacaggatgacgtcctcgctcatgcgggagagatgggctccgaccacggccaggtcaaaaagtatttccatgatgtaatcccggtcggcaattgcatccatggagttttctgtaactgcgtcaaaacccagttccacggcaattccgtggcggtccaggcagatggtggaaccggcgatggctccggaaccgagcggggagacgttcaggcgcctgcggcagtccttgaggcggtccgcatcccggtccagcatttccacgtaagccagcaggtgatggcccatggtgacgggctgggcgcgctgcaggtgagtatagcccggcatcatggcatccgcgtattccttcgccttcatgaccagcgcgcgctgcagatggcgcacttttcccagaatttcatcgatttccgcccggcagtaaagccgcgtgtccgtagctacctggtcattgcgggagcgtgcggtatgcagcttggcgcccggagcgccgatgcgccgggtgagttcgctttcaatgttcatgtgcacgtcctccagttcccggctccacgagaagttgcctgcttcaatgtctttcaggatgtctttcaggccggattcaatggcgttgaattcttcctgcgaaagcaggcctgccttgagctgggcccgcgcatgggcgatggatccggcaatgtcctggcggaaaagcctccagtcgtaggagacggattcgccgtagcgttgaaccagatcagcggtgggtttagaaaatctgcctttccacatgacccacatgttgtgccccaggagcttccgttttgaaagcctgaaatgggtaatggaggcagattccgcggaactgggaaaaatccgcatgcctggaaaaccgaagtggagccggaaaagagagaaacggagcatggctgtcttttccctgtggcgaacggaggcggatatgttattacgatgccgtgcgtatggatgacgaaatgcctctgaaacgggaagatttgcggaaacgcgcggaggaaaaggcggcggaattggctgcagaggggatggaactgcgccccgtaacggtttccgggcgtaccctggcgaaaaggttctgggggaaggaatggatgaagagcctgtctgcgtgcgaggtgtacgggatgcggctggcccccggccggacctacctgcgctatggctgtgttctggaccttaaaacggttcccggccgcatcgatgctctggtgatgggtgaacatttgtatgaggtttgcatccaggcctcccccccggatgaagaggtgcttgcccggctgcgcgcacgatgcgccgggcagattggttcctggattgatctgctgaaagggaatttgtctcccgagctgctggaaatcctgtgcgctccggaaggcggcctgtttcccgcgccggaagagtggcgtttttcctgttcctgtccggattgggcagatttgtgcaagcatgcggccgcagccctgtacgctttcggcgtgatgctggataagcagccggagttgttgttcaccctgcgcggaatggattcctccgttttgattccgaaagctccggaacccgttcccggaggagaagacgcactggatgtggatgccggttccctttcggatatattcggcatcagcctggattgattattgccgccgtgattgtggctttgttccggttttgaatagccaggaaggaaggggatggccgtcctttttcatgaactggcggcggatgagagtgtccgggcagtcaggcgtgccgttggccgtctgccaatgtttccgcatgatgctcgcccgggtggagaatgttcccgctttttccatgatgcattgcaggttcgggagggcggaaaaaacgagataaagaaccaggagggtccggtatttcacgcctccccggcggagggcccggagaaagagcagggaaaggaagggatagaggacggccggagctttaaagagaagttcattgttcatgatgcccgtgcggaaaaagagactgcctgccatcatgcccagcgtgatgtagtacaacgggtttttccggcattttgggaagaggagcgcccccggcagcaggatccccagggccagggccagaaggaagctggcgtatttggcggaaccgggatggagcagaagccgctgctgcccgtaatggtagatttccgcatattttgcgtcaaacaggcaggaaaattgccctcctccgtccaaatgggaataaaagacggccatgacggccgtgcacagggccgcgagccaaaaaaccggttggcccagaagggaacggagacgggaaagaggtttccgtgccgacgagcggcggaacagggtttcatacgccatatacggaaggagcagaagggcgcccagcggggaggacggcagcagaagcgttcccgcgagataatacccggagggaggcagggagcgcgtcaggacgaatacggcgcacaatagcgccggaacggcgtgattgaatgtgttgaagagttggacgggcatgccgataaacaggaccatctgggcattgtattccgcaaacagggaggagaggggaattcccaggcagtccggcaccgctgccggagagccgaggcagaggaggatcagcgcccagcgggccgtcttccggattccccagcggacggttgccgccagcagcgccagttccagcccaagaaaggtccacagggccagcagccagggagtccatgattccgggcagaaagaagccgccagcgccggaggcagccaatggcccaggtagtagatgaaatgatgtccgtcctccgtgacgaggggccaggaatttgctgcaagatgttcgtaaacggcattgcggataataaaatccgcgtgttgctggcagtggcccgtgaatccgcataacagcaccagcatcaggcagaagaaggagaggaggcccagcacggccaatccgcgcccgcttaacggaaacctttgtgccggaagatgccgagcgcaggcgtacagcccgcatgccagtgcggcgcaaagcggtacggaaaaagccggatgcacccatcccagcagaaaaaggaggaggggcagcgccaggtacaacaaccccgcgcatagcggaaggcgtgcgggaaggaagaagcgggcaggcatgacgcagagcggaaaacttatcggcaggggaggactccgaagggccagcatggcatattttgtttcaaagaaaaggatgcagtttcctccggagatgaaaaatccccgcaccgcctcgcggcggccggggtttggcgttgcttgataccagttccagcaaaaaggtcagaacaggccgaatccgttgccgtagcgggcggattctcccagttcttcttcaatccggagaaggcggttatatttggccatacggtcggaacggctcaaagagccggttttgatttgtccggcgttggttcctacggcaatgtccgcgatggtggcgtcctccgtttctccggaacggtgggaaataacggcggtatagcggttgcccatggccagctccacggcgtccagcgtttccgtcagcgagccgatttgattgaccttcaccaggatggagttccccacgcccagatggatgccttttctgaggaattccacgttggtgacaaagaggtcatctccgacaagctgagtgcttttgccaagtttttccgtcaggattttccatccgtcccagtcgttttccgcacagccgtcttcgatggagacgatgggatattttttcttcagttccacatagtagtccgtcagctctgcggcggttctgcggctgccgtcggatttcttgaaaatatacagcccggattccggttcataaaattcggaggaagccacgtccagagcaatggaaatgtcctccccgaaccggtaaccggccttgtccaccgcctgggcgatgcaatccagggcgtcttccgcagagttcagcctaggggcgaagccaccttcgtcgcccacggcggtggaaaggccgcggtcatgaagaacggatttcagcgcatggaaaacttccgcgccataacgcagagcttcccggaaggtgggagcgccggacgggacgatcatgaattcctggaaatcaataggcgcgtcggagtgggcgcctccgttgatgatgttcatcatcggaacgggaaggaccttggcgttcgggccgcccaggtagcggtacaggggctgatgcagctgggccgccgccgccttggcaagcgccagggaaacacccagaatggcgttggcccccagtttggccttgttgaatgtgccgtccagggaattcatgagggcatccgccgtggtttgttccgtggcttccagaccgatcagggccggagcaatgacgttacggatgttgtctacggccttggtgactcccttaccctggtagcgggttgtgtcgccatccctgagttcccaggcttcatgttccccggtggaagctccgctggggacgcccgccgtgcctacggcgcctccttccagataaacgtccgcctcaatggtggggttgccgcgtgaatccagaatttcacgccctgttattttcgcgatgcgcatttctttcataaaaatcggatggttttttccttggaaaccagatattggaattagtttaaactaattcacaaggtttgtgtatcccgtatccggagcggatgcaagctttttctccgggagaaagaccggagttcaatcagtacggaaaccccttggcggcggttcagttgcggtaatgttccttcagccacgttatttcttcgccgtgcccggcgtcgtccctgggcgtttccaggaaaaagggcaattcccgcagaacgggatggttgatgatgttgatgaaggcctgttctcccagggaacccttgccgatggtttcatggcggtccttgaaggaggaaaagggtgtcatgctgtcattcagatggatggcacgcaggcgttccagacccagcacggcatcaaaatgttccagtacggaatccagcctgttgacgatatcatatccggcggaatagacatggcaggtatccaggcatacgccaagtttgtccttcaggtccacccgctccatgatggcggccagttcttcaaaggtccggccgacttcgcttcccttgccggacatggtttccagcaaaacaatggtcttctgttccggcgaaagtacgtcgtttaattgatccgccaccagttcaatgcctttttccactccctgccctacgtggcagccgggatggaagttataaagatttcccggcagatgttccatgagttccagatcctctttcagtacctgggccgcaaaacgggcgacactggggtctgcggaacaggggttcagcgtgtagggggcgtgtgccagcagcgtgccgaatccgttattcctcgctaattccagaaaacgggcaatatcctgttcgtcaatagctttggctttgctcccccgcggattgcgggtaaagaactgaaaagtattggcaccgatggagagggcaacccggcccatggcttcatagccttttgcggaggagaggtggcatccgatgtatggcatggcggtaagttcggaatggaaaggaagtttatcaatgccgcagagaggaagagagactaaaaggcctgcatgacttgatcggaaagaataagaccgccaggaacgtacgaggagttaaaacgatagtgattgttggtaatgaatttaaaccagttgattaaggcggccgtattgggaggggccctgtgcacggcctgttttgcaggagccgggccgaagggctgtttaacgccgttaaagcctgttccttccgcggagcagcttgaatggcatgacatggagatgtatgcctttgtccattttacgattaatacctttactggaaaagagtggggctatggagacgaaaagccggagctgtttcatccttccgatttcgatgcggatgatcttgtcaggacgctggcggacgccgggttcaaaggggtggtgctgacctgcaagcatcatgacggtttttgtctgtggcccacaaagacgaccctccatagtgtagcggcttctccgtggaagcaggggaagggcgatgtggtgaaggaggtgtcccgcgcgtgcggaaagtatggcgtcaggttcggtgtttatctgtctccgtgggaccgcaatgccgcctcttacggaacgccggattatatccggatgtaccgtcagcagttgaaagagctggcgacgggatacggttccattttcctggcttggtttgacggagcgaacggaggggacgggtattacggaggagcgcgggaaaggcgttctatcgaccggagcgcgtattacgactggaaggcaacttggggtgagttgaagaaacggcagcccggagccgtcatcttttccgacgtagggccggatgtccgctgggtaggcaatgaaagcggctatgcgggttatccctgctgggccacatacacccccgttccgctgcaagccgggacggaacccgcgcccggcaccgtgcgctaccggctgggcacggaaggcaccatggacggcaagtactggattcctgcggaggtggatgtttccattcgtccgggctggttctggcatgagcatgaaaattcccgcgtccggacgccggaaaatctgctgaagttgtattttgacagcgtaggcagaggggccaatttgaatttgaatgtgccgccggaccgccgcggccgcattcatgaagaggataaaaagtctctggcgggcttccgtgtgctgctggatgagttgtattcccgcaacttcgcctccggcgcacaggctgagtcctcctcttcctggaaggggcacggtgcggaacaggttctggaccggaaacggacgacgtactgggtggccgctccggaagataagcatccctgcgtggtattaaaattgccggagcccgcggcgtttgacgtcatccggctggcagagcccattcaactggggcagagggtgcgcaaattccgtgtggaggtgcgtgagaacggccagtggagcaaatggacggagggggccagcataggggccagagttcttctgaaaggaaggcccgtgacggcggatggagtgcgcgtggtgctggaacaatcccgggccgttccggccctgtgcgaggtttctttatggaagtatcccgtcatcctgaatgctccggcggtgaattatgaccgcaatggacgggtgaccctggcttccgcggagaacgtagtgatcaggtacaccacggatggaacggaacccggtccgcagtccgccatgtacaggaatcctttctttctccctgccggggggacggtgaaagcggcggccgaatatcgcggcagaaaatcttccgtaaccactcagattattcctgtccccacgcgggactggaaagtggtggccggggaaagaagcgccgccgctccggaactggctattgacggagattcttccaccctctggcatacgcatgccgcccagggagagctggcgcccccgcaggcgctggagatcgacatggggcgtccggttaacgttgccgccgttatctatacgccgcgcagggattccgcaacgggaacggttgaccgctatgccgtctatttgagcatggatgggaacacatggggggctcccgctgcggagggggagttctctaatatccgcgccaatcccgttccgcagcggattgacctgaaagcgcctgtcaaagcacgttatctgcgttttgtaggcaagcgggtggtggaaggcagccatgttgccgttgccgagctgggcgtattgggaaaataagcggtttcctttttttattatcgtagtcctccggcgttttcttgacggatggagggaagaggggcaagatggcacgcatggaacaagtcagtctcatggagttgggcaagctggccgcggaaggccagattgaagcggaagtttttgcccagattgcccagtgcgcgcagaagatgaccaagggcaacaagccgtatctggatgtgtcttttgccgatgcggaagggacaatgggactgaaggtgtgggaggataaaccctggttccggacgctcgcttctctgcccctccgcagtttcgtgagcctgcgcggccaatgggccaagggagggttcggcatggaagtttccgatctggacgtgcggttgctggacgaacaggaaaaggaaagctttctggccggttccggaaccttgaagaaaaagcaggaagctgatctgaaggaaatttgcgtgctcatcaagggcatgaatgatccgcgcatacgcgccctgtgcattgaattcattgagcagttcggggaacgcctccagcgcgccgccgccgcccgcacctaccatcacgcccgccgtggcggactggtggagcacgtagcggggatgatgcgcacggcctctgccgtctgccaggcaaatccggggctgaaccgtgatcttctgctggccgggtgtctgtttcacgactgcgggaagttgtgggaaaattgctacccgaaggaggattttacgatgccctattcggaggccggagaactgctgggccatattccgctgggcattgaactggtcaacaatttgtggaagcgcatcatgtcccttccggaagcggattcctggaagacgctggaccctccttccccggacgtgcgcatgcacctgctgcacctgattgcgtcccaccacggggaacttgccttcggctcccccgtgtttcccaaaacgccggaagcggtggccctgcattacatcgacaatctggacgccaagctggaaatgttccgcggagcttatgagacaagcgaggccctggctcccagagtgctccagcgcaaggcccccctgcctgccaacgttgttcttccgctgccttccgtcctcccgctggagccggatggtgcggatgccatgccgtaaggttcaccctgcatggaagaagttcggcgtgttctgcgtccgtggccggaacggatgacggcatctgctcccttgctgattccggctttgtccctgctgtgcgcttgcgcggcaatggatgtttctctttggttctggattccatgcttctgcctggcgtcgctgccgtgttttttacgtgcgccctccatgggggtgcttgccgttgccctggcgatgtgggccgccgtatatcttttcgcgtatgaacgggaatacgcaggcgttcccgtggaagcggggagagtcatggttatggaaggctccgttgaggctgtttccggaaaatccgtgttgtttcgcccggatggttcccggtggctgtacgcggtttcctcccgtgacggggcctgccctctggaggcaggggaacgctaccggatcaggggagaggcgtatccgcttcaggcgccgtgcggtcccggcatctttgaccgggagcggtgggggtacttgcacggcatcatcgccggaatccggctggatgagtattgccggaacgggccgggagactggcgcagccgtttccgggctttttccctgcggctccgggaaagggctgcttccctgctcagggagggcgcccctccggatgatgaggcccggcaggtgatggtttccgccgtgcttggggacaagacggacgcgaggccggaaacgatggcgaagtttctggaaagcggctgcatgcatgtattcgctgtcagcggcatgcatgtgggcgtggccgccatgctggttctgggtatgctgaggcttttgcatgtgcacccccgtgcggcccggctggcctgcatccttttgctggcggcgtacgtgttcgtgaccgggatgtccgcttccgccctgcgggcgttcatcatggcgacagtctggcttctggcgtttgtgctgcgcagaaagggacatccggccaatattctggcgctcgctttcatcctcctctgtttaatgaatccgctccaggttttccagccggggttccagctttctttttgcgtttttgctgtcattgtctgcctggcggaatggctcagtcgggaaaagcccctgtggtcgccggacccgtttattcctccccggatttatcatgcgcgggaaagattcctggtgcggctggaaaaagcatgccgcggcgcgctgatcatctccgtgggggcgtggctggcttccattcccctgacggcatggcacttcggaacctggaacctgtatgctcccttgaccaatttgtgcctgagcgtacttgtctttccccttatgggcatttccctgtccgggctgatgttcgcgtggtgtccgtggatgctgcatgtctgcaatacggccgcttcctggctggcgtccgccatgttgtccgtagccgggggagtggcttccctgccgtacagttatctttcttccgcaccgccttccggggaaaatgaagctgttatcgttcccttgcagaaggatgcctgggccacagtcatttccaatcccgcattggttgtgggaagcggaacggaagatgcggtgcggtacaccctccttcccgtgctgaaggcgcgcagtgtccggccctgcggcatgctgtcctggggaaacggcaaggcggaacgggccggagagaaagaactggagaaggaatatcccggaatccggaactggggcgcggagcccggggaatgtcccgtccggcaatggaggttacggccgggcaatgcacttgtgctggaagattttcctgtcccgttgcgcacgggaatccgtcaggaccggaaccgggtgttgtcatgggaatgccgcgggcggcggttcctgatgatagggaatactgggttttcttccctggcgcgtgcggagaaaacaccgcgggcggacgtattgctcatcgggcatcatccgcgcgacccggtggacagcgcggcgtggatcagggccacaggcgcccgcgcagtcattttcacgacggagcatgaatgccccgtaccggagggaacagccatataccgtctccgggaaaccggaaccctctatctgcggatggaagaaaagggcgtgcaaatcatcccctggaggggcatggaacgccgtacagagtaaatcccgtgctttcctcaatgcggatgggaaggatctctcccgcctggtcaggggcggcatccaccatgacgggcttgttctgggaggtccggccggagaggcgcgccgcattcgttttggacggcccttccagaagaacttcctgcacggtgcctaccagatcccggtttttccggatagctatttcattgactacggccagaagatcctggttgcgcgcttccttcacttcttccggaatctgattctccatcacggcggcgggtgtgccgcggcgcggggaatagcggaaaatgaatgcgttgtcaaactggacctgttccacggcctgcctggtcagcaggtaatcctcctccgtttctcctgggaagcccacaatgatatccgtggtgatggacaaatccgggcgtgcctgcttcatccgggagcaaaggtccagataggtttcattcctgtacggcctgcgcatcattttcaggatgcggtcgctgccgctctgcatcgggaaatgaatgtggctgcacaacttgggaaggtaggtgaacgcctgcaccagatcctggcggaaaccgatgggatgcggggaaacgaagcggatgcgccggattccttccacttcatgcacggcttccagcagctggacgaagccgcccttgccgcctgccgtttccatctgcctgccgtatcggttgacgatctggcccagcagcgtgacttccttcacgccggcgtccgccagcatcttcacctcatccaccacgtcccggatggggcggctgcgttctgcgccgcgggtgtagggaacaatgcagtaggcgcacttcatttcgcacccctgcatgatggagacatacgccgtggagcgcacgccgggattcaggtgatcccggattcggttctgggaatccgcctcttccgccacatcgcacacatgcgtaccggaaaaggcggtttgcaactcatccatgcggcgttcctggcgcgcgcgcagaatgccgtccacatgttcaaatacgcggtggtatttctgggtgccgaccacgaggtccaggcgcggcagttccttgaacagttcctcttttttactttgggccatgcagcccatcatgccgtacactacatgcggacgatgccgctgctgcttggccagaagccccatttttcccagagccttttgttccgcctgttcccggatggaacaggagttgaacaggatgacgtccgcctcatcctcgcggtccgtcatggtgtagcccttctgcacgaacatgcgggccacctgttcggagtcccgttcgttcatctggcagccgtaggttttgatataaagcttgggcatggaaaaaatcaggtattttttttcagggtgaccacgcattccagatgcttggtctgggggaacaggtcaaagggctggacggcggtgacgaaatacccggccttgtcgaattccgccagatcccgtatctgggtggcgggattgcaggaaacgtaaacgacttttccggggccgaaggcaaataactgggccaaaaattccgcactgcatcctttccggggagggtcgatcaccacggcggttttttccgcggggaaatccacccgggcaaaaatggctccggcgtccgccgccaggaattccgcgtgttcaattccgttgctgcgggcattgctgcgtgcccagtccgcggaagtctcgctgacttccacgcccagcacttttttaaatttcttcgccaggctcagggcgaacaggccggaaccgcagtaggcgtccaccaggaattcctccccgtccatactcgcctgttgggccacgtaatccgtaaaaagcggaagaatgaaaggattattctggaaaaagtctcccgccagaaaatggaattccaaatcgcccacccgttcgcaggcgacggcattgttattggtgatgacggttccttccgaggcccggagcagaatggtggctccccgtttgaaccgggcggcggcctggtaaacgcttttgcgggccaggggcagggcttcattgatgcactccatggcaatcgggcattgcggcacgtccactacgtcccttctggagcctgctttcaggaaaccgatggccggcttgcctccttccttcggcttgtcaaaatgaggcgtaatcttggagcggtaatggtattggcggggggaggctacggccggattgacgggcagttccagccctgcctgcaagcggagcagatccgttacctgccgggtcttccagagaagctggcggtcataggaaaaatgctggtactggcatcccccgcaggttccgaacaggcggcagcccggttccacgcggtccgggctggggttaattacttccaccagatcggcggaggaatagttcctgtcattacgccagacgcgcgcctttacacggtctcccggcagggcaaaggggacaaaaaccacccatccgtccacgcggccgatgccgtcgcctgcattggaaagggcgtcaatatccagttcaagctcctggtggtaggaaaaaggttcggggtggaaacccttgggaatggtcgcagtcatggtggtgggaaaagattatggggcggcaggggtaatcaacttgccgtccagatcgtacagcagggtttccggcagccggggggtgcgcagtccggggcggaaatcgcccggcaagacagccggccccggtgcggattcttcattctcatcctctggaagaatctcctgttgcgccggagcgggcgcccagggtgcgggctggttggctgaagcggtttgttccggctgaacggcaggaactggggcggggtcctgaggtgccgtttccttgttggaggcgcaggaagaggtccaggccagcccggcaatcagacaggagcggatcaggagttttctcatggcgcggattcttacagcttcatccggacttggcaagtgaatagccctgctatggaccgtgtaaagggcatttcttttttacttggaaaccggggaatgcttgctgtttgactctcccgggatagtgtttatagtaggagcacgtatgagattttttctttctttgtgttgttccgctgcggtttcagggttgtttgccccacaggctagcgtggcgcaacagcttcctcccattttcgggtttgccaataaagacaggatacctgaagttaataagtcgggcagtcccgtttttgacaaactccgtaatgaagctatgaagaaaaagctgccgctggtaatttatcttactggttcttcgtggtgttcccagtgcaatatttttacccgggaatatatccaaaaaacaaatttcaaaaatgccgccgggaaaaaatttatattttggctggtggacaccaaacaggtgccgggcaattctccggggacgtttcaatttaaaatggttccggaagaagctgcaaaaatcgtggggtgtgtggattctccccgcgcgccgtatgtggttcttggacctcccgccgtgtttatcattgaccctgtttccggaaaattgatcaagagcctgttccctaagagtgaagtggacaagtatggaaaacctcttgccggaattattgaagaaacctgggcggagttttcccgcaagcccaaataggaaacggaatgtatgcggggaacgtccggtattttcatgctccagccaagatgacggggaacaattccaaaagttcttttgtttatttataggaagcgaaaaaatcctcccggcatccctccggctcctttaaaaaaggcagcgtgcggaatctttttccggggcggagcgattgccgttaaaaacggtaaatgcagcgcagccatgggcgcgacgtgccggaatagtagggataccaccggtgtccggggtggtgcatggtgcggccccattcatcctgacggcgcgcctggggcgcatagaagagctgcttccactcccggctgacgaaggaagaaggctctgtttccgaagccggaggcgccagaaacgcctggagggcgctggaagaacagcaataatagggaatgttgaaccggggcgccattccgaacgccagcagaagccatatccagacgcggaaaccgggatgccgcgtccaggaggaagccagaaaggcaagcaggcaggccatgaccggaacgcttcctttgcaaagcaggtcattgacgtctccgttcacgtaaaaaaaaggcagaatcaggccggttgtcagcgtacagataaagaggggattcctccggaaatcccgccagcagaacagggcgtacagcaggaatgaggtcgccataagcgggaaatcccccggatgcgtataaaaagaccgcatgcccatgtgggatgatggcgcgtttaccgtcccataataaagaaggaagcacactcccagcagaacggaggccgaaaaggagggatggagcaggacatcccggagaggggggacgcctctccactgacggtaccactggcaggccgccaggggaagcccaccgagggccgcggggggggaataaaaggccgtggctgcgaacagaaggggtatccagggcaggggcatgcgtcctgaagccaggaagatgaaaaaaagcagaactggaatggaagcgtttgcgctgcacatgatttgttccgccgtgccgaagtaatgcaggcggaacaggtccagccccagccagcactggaaattcagcagagaaccgaatgccgccatcagcagggcgagcagcagggagcggcgtccggagaaaacgcagagccacagccaggcaagaaacagcccccaggttccccacagaacgacaagcacgcgtgcggcgtccagccccgccagttttcccgccagggctgggaccagccagaaccccgtgttgtaaaccagcatgttcccgtccggaaagatgacgggccatgggctggctaccaattcacgcaggcaggcgtttctgacgatatggtcagggtgctggttgacccattccccccagccggaaagcgtcatcagggcggcaaacgccgccagggcgagaaatgaagagcgggtgaacagggggaaggcgggaagggaatcccttgtttgcggttccttgcattttcggggcgccagtcccgcagccgtcaggagcatgagggggagagcggcgtaccagtacatccacccggccaggaataccaggacgggcagcagaagccaggcgcaggtgtgccacttcagcgcagttgcgttgaacgcttgttccgggcacggggcatcagcggcagaggcaggcatttcccctgaaccttaatggggccggcccgcgggggcaaggaggaaactcgcaggccggaatggaagggggcgtttgtatgggtatagtggcaggaatgagggtgcgccgttgccgctttaccggagaaacgggggcctcatactgggaggcctatgaataaaacacaatttatccgggagctccagcgtgagctggggaatgacgttacttcccggcaggcggaacatgcgttgaacgcggtgctggagacgattgcgcggtcggtccggagacggtcgctggtgaaattccggggctttggcactttccgtgtcaagcggcgccgcgcccgcatcgtacgccatccggaaaacggcggcaggctgctggtgcatgaatcgaaaaccatgaaattccgcccctcttcccttctgtggaaggagtaggggaaacgctcgggaactcctgccattttgccattgacttccccgtccgtggaggcccttaatgtggataaggcaggagcgtttttgcctgcctgaataagtaactggccctttccgcatttgccgatcatgattccggattccgttcatttgctgacccgttcttctcagatgaccctgtacaaagatgaacagggccgtgtgcgccgcgcctattacggaccgaggctgcatcagccggaggatgccctggaaaacgccgcggatgctcctctcctgtattcctccctggcggattccgtaacagggcttcccaatgcgtccggcgagtactgcatttgcgtgacccaggcggacggggctctttccctgaacctggaatgcctgggttgggaagtgctggaactggatgacgaccgggaagaagccgtcttctatgggaaggacccttcctaccctgtgcgggtggaaatccacgtgcgttcccacagggaatcggacacttttctgcaatgggcggtgattcggaacgaagggaaagaaggcatccgcctgcaccgcgcggcgtccgcacagctgggtttgcgcgcagaacggtatttcgtcaccagcttccgcggtacctggggcggcgagttcctgatgagtgaggaagaagtggcccgggggcatgaacttgccctggtatccggaaccggcacccgcaccgcccaggagggaagccccggattcatcatctctctggacggtccggcgcgggaggattccggggaggtggttctgggggcgctggcatggtccggcaattaccggatatggttccggcacagcccgtatcattacctttttgccggagcggggctggatatggctcccgcgccctatctgctggacggcggcggtgtgttcaagacgccgcccctcattctggcgcacagtaaaaacggcaagggagaggcctcccggcgcatccaccgctgggcgcgccgttacggtttgcgcggtggagaatcagagaggccgaccttgctgaattcctgggagggggtgtattttacctttacggaaaaagtgctgcacggcatgatgaaacgtgcggcagacttggggatagagcttttcgtgctggatgacggctggtttggcggccggttcccccgcaatgacgcccgtgccggattgggggactggcaggttaaccgcgctaaattgcctcatggactggaaggcctcattcgccaggcggaaaaactgggaatacgcttcggcatctgggtggagccggaaatggtgaaccctcattcggagctttatcagaaccatccggagtgggtcatcggtctcccgcatcgggaaaacaggctggaacgcagccagtatttgctggacctgagcaatcctcatgtatgcaggtacattcttgacgccatgcggaagctgcttggggggcatccgggtatttcctacgtcaaatgggattgcaaccgcaaaatttccgaccccggctctccctggctggatgcctgccgccaggggaatatgcccattgactacgtgcggggctatgaacgtattcttgagacgctggcggcggaattcccggatgtgatattccaggcctgttcctccggaggaggccgcgccgactatggaaccatgcggaaacatcatgaattctggacgtccgacaacacggacgcttatgaacgcgtgttcatgcagtggggcataggccacctgttcccggctatttccatggccgcccatgtgaccgcctcccccaaccaccagacgggccgctccgctccgctcaaattccggtttgacgtggccatgtccggtaggcttggttttgaactccagccatgtgacatgacggaggaggacatggttttttccaaacgggctctggcggaatacaagcgcatccgccccgtagtccagttcggtgacttgtaccggctttcctccccgtatgaaagccgggtggcctctctgatgtatgtatacggaaaacgggctgtcgttttcgcctggctgatggataagtggctggcggattcccctccgcccctgcacctgaaaggcctgaatccttccgtcaggtacctggtgcgggaaatcaacatgaatgaagacggctctctcacggatgttcacgaacgaaggctgggaggcgactttctgatggacgccagcatccgcatccgctggaaaaaggccttccagtccgtctgcctggaggtggtggaaacaaaccctgatgctccggcttcatgataaaaagctgtagactttccgccagcagcctgatgtccttttttcatggtgggaaccggtgtttggcgcaggtttcatccccgctttattaatgttgtgagttatgcggccaacttgccattctgacgccgcttcttcataaggggtagatggtaggtgtaaacggtacgcccgtgacggaatgcatgatccctttccggcttttcagctgaaccggatattggggcagttgcgttaagggggggcactaacatgaaggcggcaataaagagaattattgccgcctttattatttattgagttcctgtggatttgctggcagtcctagatgcccaccacgccgccgatggtctggatgatgaccttggcgatgatggtcatcaggataagggccacggggtaggcggtggcgtagctgaccacgggagcctgggagtccgttttgctggcgatggctcccagagccggggtggaggtcatgccgccgcagatgccgcccaggcattccagaatgttcatcttgaagaccttcatgcccacgaagtaaccggcaaacatgccggagcaggtgacgatgacgcccatgatgaagacggccgcgccgtgggtggctaccgtatccaccaggtccgctccgcccttgatgccggcgtcagccaggaagaagaccagccctaggtcctgcaaaagaaggcgcgtggggcgcgggatgtagccgacgatggggcccagccgtccgaagtggccgagcagcagggcgacgatgagggggcctcccgcaatacccagggagattcccgcgccgttgccgaggctgaagttgaccaagccaagaatgatgcccagggagaggccgaagcccagggaaagcaggtccgtctggttcatgtcctggctgcggtggccgattttgtccccgtatttggtaaggttttccggggaccccaccacggtcagcacgtcgttgcgttccagtgtggtttcccccgtggggacgaaagtgaagcccaggcgggaaatgcgggagataatgataccgtccgtacgcagggttttcaggtcgcggagcttgtgcccggcatagtttttgtttgtcagaatcagtttgcggcgctccttctgggagtccatggggtagggattgtcgcatacttcccccagaaaggcgatgtcgtggggcatagtgtcgctgttgcccacgatgaggacttccgttccttcccggaacgtgtcttccggagtcaggggcatcagcctgtcgttgcgaaccacgcgggtgaccatgcagtgcaggccgtccagcagcttgcagtccgcaatgttttggcctatcaggttgggctgtgtgacgcggacaaggcgggaaatgatgctgacctcctgtttggaatgcatggctttggcctctttgttgaggtcaaagtgcagcaggcgcggcagaagctggacgaaaaggaccacgcccaccacgccgaacggataggcgatgccgtaaccgatgctgacgccgcttccggaggctcccggcaggctttccgtggcggccgccagcgccggagtgctggtgcatgcgccggcaaagatgccggaagagattcccgcggggactttgaaccagatgccgaaaaggcaagtgaataaagctgacactcctacaatcaccgcagacatgatggccagtttgctgccctgcttggcgatggcggaaaagaagcggttgcccgcgctgaggcccacgcagtacacaaagagcgccaggcccagctgccctacgccgtcgggaatggccaggcggtagtggtaggcggccagagccacgaaaagaacgccggaaagacccaggttcagtccgtatattttaatgctgccgagagcgatgccgaaaaagatgattccaaagagaaccagggtgttatgatggagcaggatatcaaacataaagacggttagcggttttgtttccttccttgacgaagggcgggggaatgcccgtcacggatgagagtgcgtgcgttgaaaaagtagagggtgcggcgtatgccttccagccccgtcagtttctccgcaggtaatccagcagagtgccctggtccaggcaggacatatagggcatatggtcgatgcccttgtccatgatgaacctggtcagcagtttgcgggcggtcgcaaggagaacggcgggatcccagggcttttccagatagttgtcaatgtgtgcgtcattgacggcctggatggtgtccgcgtgggtggcctggccggtcagcaggattttgcgtgtcccggcaaaacggtcgtctttggcgatgcctccaagcaactctactcctgaacctcccggcatgacgtggtcggaaataatcagtcccgtcagttctccgtcctggtcgaattcttccaatagctcgcggcattcggatgcggattccaccccttccaggcggaagcaggaattcagcggacgaaggtcgcgcaaaacgctgtccaggacttccggctggtcgtccacgcaaatgatgttaattttttccatgattgttgatggttggtatgactatcgtaaaaacggtatggcccggaacgctctccaggcggatgcggccgccgtagctgtccacaatgcgccggacgatggtgagccccagccccaggccgaaggaaagacctttctttttggtagtgaagttgggacggaaaattttttcatgcaggtcctttgggacgccggggccgttgtctgtgacggagaccagaatttcacgggtggtatgggatgtctggtccttgctgctgattttttccacccggcattctacgtggatggaagggttgggggtattttctattttcagcgcgtcgcaggcgttctgaagcaggttgatccaaatttgaacgagctccgtcatatctgcgaagatgccgggcacggagtctctggggggcaggaccatttcaaaatcaacgccgcgcagactggacttgaccagagcaacagcttccgtaagggaatccgtcacgtttacgccttcttcccgtctggtgttgcctcctcccagcaggcgaacggaacggacaatggctgtagcatgcctgacagccagtttcatgtcatgcaggtcgtgtcccaattcccaataagggaggttttgttccagctggctgaggaatggcttgttcagcagctccggctgattctgtatgtccggaatcagggccagggccttggccacgtcctgggaaagcccataatttttttcaaactggcgcgccagcctgcgctgttcggaagtggatgcggaggaagccccttccaaccctttgttgtacagggtgtagcggaaggcgttttcctggcggaacatgttgtccagggtttccagaacaaagtctgttttacgggacaggactcccagggaattgttgagctcatgagctattccggcggataattgccccagggtggcggccatttcagaacggtggagcatccgcagcgcttcttccttttccgcagtgcggtcaaagacgcgggtattgcgcgccgccagttcatggacaatggcgggaacaaactgttccaggagcgtgccgtagtgttccacgtccacggcaggggtggcggtgtcgatataggccagttccaaatcggtttccgcaatgagatcggaggagctgcggaaccatccggaaaagaaactctgcactcccaaataatctccgggaccggcccggaacgccttgtagattttgtgggaagtggaagctgtttccgggtcttctttaacgacgtggcggtaggaaaccacgctgccggataaaatcaggtaaagccttttgttctgttccccctgacggacgacgctgtttcccctgctgatggcaataatgcggtccggatcggagaagtacgccagattgatgcgttttagttttttctggaattcttcctgttcaatgatcatagggcgcttttcccgttgatgttggccatgccggggcaacatgtcccggcatggaacattaccttacttaaaaagcatggcattgggcaagaatcatcatcatgacgtaggttaaaaccatgcccaggatgcccaggatgacgccggaaatggccattcccttggagctgaccaggccggtggcataggccagggcgttgggaggggtgctgatgggaaggctcatgcccagggaggaggcgaaggccacggataccagcagggcggtaacgccgcccatgggagccaggttgtcacccatgttgacgccgacaacggcgataatcggaatgagcagggaggccgtagccgtatggctcatgaaggtggccatgaacaggcagatgattcccgtacccaccatgagcgggaagggggaccattcggcaaagggaatggagccgatcaggttttttgccagtccggtgtcttgcagggccagccccagggcaaagccgctggctaccagccagagcacgtcccagcccattttcttcaaatcttccttggtgatggtttccgtaatggcaaagacggcaatgggaatcatggcgatggtattggagtccagaccgtgtactcctttgcccgttacccacagcaggacggtaacggcaaaggtgacgtaaacgataatggccttgggggttctcaggaatttccctcccacctgcagttccagtttcttttgggagatggggaacagccacagcaggagaagccatgcaatcagaatcatgacgatgacgaaaggaatgccgaacatgagccatttgccgaaggagacgtccagccccataccctgcagcgccttcagcgcgattgcgttggggggcgtgccgataggcgttccaatgccgccgaggttggcggcgatggggatggccagggcaaaggcggcgcggcctttgtcttccggagtgaacagggccagcaccggcgtcaggatggcgagcatcatggcggccgtagccgtgttgctcataaacatggagaaaagagccgttacggacatcagccccagaagtacgaatttgggattggtgccgaagggttttaaaagtactttggccaggttcatgtccagcctgtatttggttgcggccgcagccaggaaaaagccgcccaggaaaagcatgatgatgggatccgcgaaggtggccatcgtggatttttgctgcatggtgttgacaaattgcagcccctggatgcgcgcggttatttccttgctgtacaggcgcccggccgcggtcttgagctgggcggctatggattcctgcccggcggcttcttccgtttttccttcacgggacagttcctgtgcgttcagatctattttttcataagcgtccatgagctggaaccccagggtcatcctcacttcttccgcgtccagcttggttttcttatttaaccggttttcgacattttccttcaatttgccgactacctccggattgatccctttgcctatggcgtcatccagaatggaggataccgccgccttgtcatagcgctccggcatcaagaatgagagagagccgttggagacgcacagcagggacagggtaatgaccatcacggaggtggtccagatagggatgggttccaaaatccagaagagcgccgccatgacgaacatggcgatgacgcggatttcaatagggcttaattggattccccatgaagcgaaaggcaggaagaagacgactcctgcggcggccaggctgatagctgccttgagcagcttgttttgggtttcactcatgaataatagctggtaatatggttggcgggcggaagggtacttcccgattttacaaatagaaacttttatttaaaaaaattatgtcagaggggacggctgccgtttcccggagctggagccgggagctttctccgtgatgggaaaattgcgcaaccctatggggatatgcgtgtttagcagagataagtcaatcatccgttcgggggcgccgatttggccgagtgtttcctctgtattaaaaaaattctgaaggtagtaggttcctctatagccgcgcgacgtcaaatccccgctgatctggttgatttccttttccccgagaaggccggagtggattgtcgttcgaacctcaaacgggaaattcctgttgatcagataatccagcgtttgagtgaagcaggggaataaatccggacgcccggtaatggagccgaacagtttttccggcgctttgtaatccagggcaatatagtcgcaaagcccttcctccaccagcgttttcaccacgccgggccgggtgccgttggtgtctatttttattgcgaagccaagctgccgtatattgcggcagatagggataaggtcgggacacagcgtgcactcgcctccggacagaaccaccccatccagaaatcccacccgatctctgagaaaatcaagatagtccgtccggtctccggcaggagaatccgttcccctgaccagggagacgttgtaacagtactgacaaaacaaattacagcctctcagccagaagatgcaggccaccttatttggaaaatccagcaaggtgagcggcgtgatgtctgctatgccccgacccgttcccatcgacttcgcatatgttgttgggagaattatcgcggctgttccgtttgggcggagcaggagcaggggcggcccggttccacgaagtggacgcggtcatggaactcgccctgtttgccggcgttgaaagtttctacagggcggtgatagcccatgacgcgcgtgtaaacggtgcagcgggtccggtcctgtgcgtatttgcttaatatttcctgtttggtcattgtcgtattaatggttgggtttgaagtcgggagcctattggaaaagggattttattcatgcctgtggatgtggagcagctcttcatcgcagaaggggcagtattcgtgctccccgcgcagatagccgtgtttctcgcaaacggagaagagcggggtgacggtgaggtacggcatgcggaagcgggtcagcactttgcggacaatgtcccggcaggcttccggggagctgatggcttcgttcatgtacatgtggaagacggttcctcccgtgtagcagcattgaagttcatcctgaagctggagcgcccggaacagatcgcttgtgtggtccacgggaagctgggagctgttcgtgtaataacgctgccccacagggccggcctggatgatgtcaggatagcgtttctggtcttcgcgggcgaagcggtgcgtggtgccttccgcgggcgtggcttccaggttgtacaggttgccggtttcctcctggtactcctgcatgcgcaagcggatgaattccaggatctcttcagcaaaggccctgccttcttcagaggtaatgtccatcgtatcgttggagaaattgcgcaacagctcgttcatgccgttgacgccgatggtggagaaatggttgcggaaggtgggcaggtagcgtttggtgtaggggtacaggccgcggtcatacatttcctgaacgaaggcccttttcttttccaggcaggatttggccaggtccagcagttctcccagcctggcgaacagggcctcccggttttgcttgaacaggtagcccagccgggccaggttgatggtcactacgccgatggagccggtcatttccgcggagccgaagagaccgccgccgcgtttgagcagttcccgcaggtccagctggaggcggcagcacatggaacgcacggcatccggcttgtaggcccgttcgtcaggcacgcgttccccgtgttcattgacggtgtactggctgccgatgaagttctggaagtaagaggaaccgattttagcggcgttttcaaacaggagaggcacgttttccccttcccagtcaaagtcttccgtgatgttgacggtggggatggggaaggtaaagggctgtccggtgctgtccccttccgtgagaacttcgtaaaaggccttgttgatcaggttcatttccttctggaaatgcttgtaggtcagttccgtcagcttgtttgccccgcgttccctcgccagggcgagcaggttcgcgtcttctattccttcaaagaggtgttcccctccgctgaagggggcctggtcccgcaggtcgcgcggcacagtccagtcgatcgtgacattggtaaagggagactgtccccagcgcgagggtacgttcaggttgtagacgaaactgcggatgtctttcttgatgcgggggaagtccgtctggtctttgaaaacgtagggcgccaggaaggtgtcaaaggagctgaaggcctgggcgctagcccattcgctttgcagaatgcccagaaagttcgccatctggcccagggcttcccggaagtggcggggcggtctgctgttcacgcggctgcgcacgccgttgaatccttcattgagcaggttgcggaggctccatccggcgcagtatccggtcaggcaatccaggtcatggatgtggtaatccccttcccggtgcgcggctccttcccgtgcggagtaaacctggtccagccaatagttggcgattaccttgcccgccgtgttgttgatgagccccgcattggaatacgtggtattggagttggcggcaatgcgccagtcgctttgcccgatatattcctctaccgtctgcttgcagtccacataggtattgccggaataaaggccgccaagctgttcgcgctgcattttgtgcaggaaacggtaggtgatgaaggccttggccgtgtcaaaatatccggaacggaacagggcgcgttcaatcatgtcctgaatctcttccacatgcgcgctgtcctgatggctcagcttggcttccacctcttcatagatggaacggttgtaggcggtcccggaactgtggaaggcttttctaatggcctcttcaatcttatagccctggtattgttcctttttcccggaacgtttgatgatgcttgttgccatgatgggtgtctcgcttggaaagggtggtgaccgctcatccgcgagcctgggcaaaagcctggaaaaaccataggcaggggccgaccgcatgcgcgcattcccggaaaaggggggcatgccgaagacctgtgcgtatgttcatcctgtccgcgggatgggaatacggcagcatcaggtcgtcttctggcttccggtgcgacatgtgatggggacttcccggctgcctgggcagccagtgtccggtccatcgtctaccggttacagcggcgcgtccgcgacggattttcaccgtcttccgttacctgcgctggaacgcaatgaaccacagaaagagacctcccgcaagaaaaatgtataaataatgtgttaaataattattcatatgctatatatagtatatgacggtagaaaaatgattgataacacagctttcttttccgtcatggcaccatatatgcccttgcgtccctttcccggtctggaggagcgcgggaaaagaagaattcttgttacaaaaaaaatccagccttcttttcccgtataatataacatgcgtttctttgccttttcaaaaaatggatggaagaaatactttctgttgccggtcctttccatgctttccgcaggaacttccgtttccggggcttccgcagactggaatgaaaagaccatccgggataatcttcagctggtggcggaatggcaggcgaagcatcccaaaaaacgttcgccgctgcattggacttacggtgccttttattccggcctggtgcaatatggcctgtccgttccggaagggccggggctgccgttgctgagaaaagcgggagaagagcaggggtggaagaccctgaaccggcattatcatgcggatgaccatgccgtggggcatgcctggatggagatggcgatggaagacggcaatcccgccgcagctgaaaagatccgcgccgtgctggacaaggtgatgaaccggccttcctccgcttccctccaattcctgactccgggctgccaggaccgctggagctggtcggacgccctgtttatgtcccctcccgtgttcgtaaaattggcggcctataccggagaccgccgttatctggagtttatggatagggaatacaagcttacctgcgactatctttttgaccgggaggagggcctgtttttccgggattcccgctattttaccgttccggcggcaaatgggaaaaagatgttctggagtcggggcaacggctgggtgattgccggattgcctcttattttgcaggacatgcctgcggactggccttcccgccccttttatgaagacttgcttaaacgtctggcggcagccctgaaaaaatgccagtcgcccgacggttcctggcatgcgagcctgctggatccggacgaacctcccttgaaagagatgagcggcaccctttttatcatgtacgggatgctgtggggagtgaaccagggatatctggatgcggatgaataccttccctccatccgtaaggcctggaaggccgcctgtgatgcggtcagcaaggagggcgcgctgggctgggtgcagcctattgcggacaagccgggccattattccgggaaagatacggaggtgtacggcgcaggggcctacctgatggccgggagtgagttgcgtaaatatgtcattggccgggatcatccgcagaagaagaccgtgaccgttacgaatcccctgggcaggttccgccctgctgagactgtgtcggttccatggccgtccggaggttccggtgatgccgccagccttcgcgtttttgatgtccgtcacggatgtgttatcccgcatcagctggcggatacggatggtgacggaacaacggatacccttttgttccagagcaatttccggcccggaacggttcgtgatttctggattctggagaattcctgcctgggcgaagcgccttctgcggatgtctgtttcagccgtccggtaccggagcggctggatgatttcgcgtgggaaaatgatcttacggcgcaccggatttacggtccggccgtcgccaggcctgcccctgagggagagggcctggtttccagtgggacggatgtatggagcaagcgcgcgggcgctcccgttatcaatgaattttacaaacggggggattaccaccgggatcacggtcggggactggatatgtacaatgtaggtcctgggcggggctgcggcggcattgccgtgttcagggatggaaaaccgcatgtgtccggaaactgggccagcgcccggacattgtacaatggcccggtccagaccgcttttgaggtggtttatgcaccgtgggacattggcggcggcgtgcgtgtggcggagacgcggagggtgacgctggatgcgggaaaccgtttctccaaagtccgcagcgtcttgaacgtccggggggctgaaacggtgaaggccggtgtgggaatggataccggaaagcgcagaaatgattatgaagcggtcatggaggaccgggagtccggcggcctgatgaccgcatggagcaggccccggaaggatgacggatgcctgggaaccgccgtaatcgtgccctgggttccggaaggccgtgcggtggatgcggaaggctgtacctacttgctcaggaaggtcgcgaacggagaaccctttgaatggtacatgggggcggtttgggacaaggcttctcccattcggtccgctgcaggctgggaagcggaggcgcgccgtgtccgggagtgcatcggccatcctctgcaagtccgggtgcggtaggagctgccgcatcctgttgtttctcgcggagcgcgtggaggcttcctcctgttacggctgcggcggtgcgggaatgggcagccattccgccagcgtttccggctggaggggggccggagtttccagcgcgtccggagaagccagattcaggtcgttcctgacgatttccgaccggatggaagccagggaaagaagggtatggaagatgtggtcgtgggagacggctttcagccggttggctttcagggcgcgcaccatgtccggatagcgtgaggcgaaagcgtccgaataccagatgaacatggcaggccggtaaacaggcggcaggatatggccctggaacatttttccttcctctcccagcgctacgccgtggtcggagcagtaaaaataaatggcgggcctgttcttcaacagtgcaatcatgcggtgaatggaggcatccaggtcgacgatggaattgtcataggcattgacggtttcttccagacgggccttggggtcgtccatattgcaggatgccggggtaaaacgttccgcctgcgcgggatagctgaacgccatatggctcccgttattgtaaatgatataaagctgcctgttgcggccgaagtttttcagggattcctccatgaccagggaagttcgttcctgcatcattccgggcgtctggtgctggagcggcgtctgtctccgttcacggcagttccgtgtcaggatgcccagggaataatcatgaatggaatctccgctcaggtccatgatacggacggtgcggaatccgtgtttgttgaacaggtcaatgaaggaggaatgaccgggagtgcggcggcacagttccgcatccgtaaacatgccgatagcggaaattctggtcacgatgccgaaggaagtggcatgggggaaggaaacgacgttgggctctctggaaagccggggcattgtgttccgatggtaaccgttcaggggaagatggtccccccggacactctcccccatgtggaaaaccacggccaggtcgtctggggcttcgcactgggaaaggggctccgcgcaggacggaaggttccgcaatgtgttgaaacgccccgcatcctgggtgatgtattcgttcgccagtttgcacgtcattgcaatatccacgagaggccagcctttggccttgtcagacgtgtagtaaagataaaggggttccgagctgtaggaggctgccggaatgttcagcagcagaagggccgcgtacaggccccaaatgcatgccagtgcgccccacgtggctttttggcgcagggaacggcggctccagtagatggccaggtagataaacccggccagaagcagagttcctgcaatggaagcgggggtgcagaaggcgcaggcttcctggaaattggtctccgccatgctggaaagcacggaaaggttcaggaccaatccgtaccgcatctgcatcatgtacaggcccgcattgaacagaatgatggcgggaagaaggacataggcggtgaagcggtatttcaggcagagaagaatggtgccgcagagcagggatgcggagcaggcgatgcccatgctgctcatcagcaggctttggccatcgttgagcacatagggattggccgccagcgccgccgcaagcccggctgcccacaggcagcgcatgcggcggggaatgaacgcggcgcgcagagcctggcagacagcggccgacaggccgtatgcggacggataccgttctgcggaaccggcggatgcatggggagggatcatcgcaaaggagggataaagaatgcttcctgcttaaagcgaagaaaaattataagagttttaaaatgaatcgcaagaagaatgttggagaagctttttccggtgtgggccgcctccgtaaaaagggaagggttttcttccatggactgctgcggcaaaaacagaaaaccgcccggaatattccgggcggttcctgggtgccgtggacggcctccggtgctcaaacggagtttatccgataacgaggaatttttcagccttggtgccgcagagggggcacgcatccacgccttccagagatttgaacgtgtctccgcaaaccaggcatatccagtattgcctgggcagggaactggtatctccgctttccagggccttcagggcgacggaataaaaatcggcatgttctttttccgcttccgtggcccacgtgaaggaacggacggcggctttctgcccttcctcttccgccacagcgatgaatctcggatacatgctttcaaattcatgggtttccccggcaatggcggctttcaggttttccgcggtggttcctacatggatctggatatcgatgggctccattgttgcccccagcttttccagaaccttgttgtggttggcggcgtggacggattccgccttggaggcggcttcaaacaatttctgaataaggggctgcccttcctgggcggctttggcggcataggccgcgtaagtggcggaggcggtgctttcgcccgtaatggcagctttcaggttttctatggtcttagtcatcggaaataaatttataataattctaaaaaaatgcaactgaaaaaatccttcaagggaggaaaaaaagcaaattcttctttctgcggcatcacggggagccgttacacaatgattcattgacgcgtgcatggcgagcctgtacaacggaaacgttatgaagagcattgtaacaattagttcggcatgtgccctggcatttgcaggtatggcttccgcccaggatgccccggctccggcacccgccgctgaaactcctgccgcgcccgttgcgccagccgctgaagtttccaaggaagcgaaggaagccgctgatcagatgctggcgttgatgaaggaaatgtccgccacgctcagcacggtgaaggacaaggccactgcagacgcggctgcggaaaagatggcaaaaatcaatgaaaagggggaagccctttccaagagcgcccagaaggttcaggctgaaatggatgccgccatgcaggcgcgccaggccgagcttctgcccattttcatgggcatgatgactgacatgcagcgtttgcagcaggccgacttttacggaagccaggccctgaaggacgccatgaagcagaccggcgctaccgttccggaagaagatgtggaagtggaggaagatgtggaggtagaagcagttccggcccccgctcccgcccagaaggaagcgtccgcccccgccgccaagtaactttctttttcaggattgtctctcctccggcattgcgagatgccggaggatttttttatggcatggccgtttgaaaaagcctccggggggggtgacgcaggaacctgcggtatgcctggctgaatgggagaggacggtgtccggagtttgccggaacatttgaaggaggctgaaaacaggcaggccgcctccgtttccggtgcggcctgccgggtagtgatgaatgaatggccagacctgttatttggcctttttcttcttggcagcggctttggcgggcttggctgccgtttttgcggccttggcgggtttttccaccgggcattcgttgacggagttccaggaccagtcccatttgtccacgttcatggcgcaggcggtcagaagcgctacggaagcgtccaggtcgtctttgtgagccatttcaataacctggtgcacattgcgggtgggaacggaaatggccccggcaatggaaccgcccggaacgaatttctgcatggctccggcatccgtgcctcccgccggcagcatttccgtctgccatttaattttgttggcgtctgccatggccttcatgaacttgaccatgcggcggtctgcaatgacggaaccgtcatacagcttgatggcggcgcctgcgcccaggtgggaaacctggtcgtgcgccggagttccgggaatgtcacaggcgatggtgacgtccagggcaatggagaaatccggttggatgtccagcgtgccggcctgcgcgcccctcaggcccacttcctcctgaacggtaaaggcggccacgaagttgcaggagggtttcttcctggaagccttgatggcgcggagggcttcaatcagcacgtagcatccggcgcggttgtccagagatttgacgttcacgcaatcccccatttccaccaaatcccgttcacgggtaacggagtcgcctacggaaacgtatttttccacttcctccttgctcatgcccaggtcaatgaagaagtcggtcacttccggcagcttggtgcgttccgccggggacatgacgtggatgggtttcacgcccatgacgccgatgaggtcttttttaccgtggacgatgacgcgctgggccgtcagcgtcttggcgtcaaagccgcccagaggcaggaatttgatgaaccccttgtcgtcgatgtgacggaccatgaacccgatttcatccatgtgggcggcggccatcatggttttttccgtgtttttgccttccacgatggcaatcacgctgcccatgttgtccacgcgcacggcgtccaccagcggggccacttcctggatgatgaaatcgcggattttgtcttcaaaccccggagcgcccggagttacgcaaacctgacgaagcagttccaaattcataatgccgtcaatgtaatggttttcatgaaggttggctagcccataatgcggcctccgaaaggaggcgccgcaggaacccgtctgccgtgcttaacggcgttcccgcgtaatgacggcctccggctgtgcgggggctccattgtccggtcttttgtaattgacgccgcgggcgtccaggaagggaagctggcggtcgaggcgtttacggaaatctttctcattttttagctcctgcggggtccaggcaacttccgccagcgccagggcgcgggggaagacatggtattcccatttcggcaggttcgggatatattccgtccagatgttcgcctggcagcccagcacctgcttttcccgttcccggggcgttccctgaggaaccggttccagtccgtaaacatgctgccaggtcagctgattgttgttaatcgtctcgtattcgggggcagcgggttttccgggcccctggtcatagtcaaagtacaggtggctgttgggcgtcatcacaatatcgttgccccgtgccagggtttgtgcggcgatgtgcggcatttggctgcgccaaaccatcatggtagcggtgggggaaaggcccccttcctggatttcatcccagccaatgagcctttttccgcggttattgatcattttttccacgcggcggatgaagtagctctggagctcgtgttcattggccaggccgttgtccttcatgacccgctgggccgtgggggactgtttccactggttcttgggcgcttcatcccctccgatgtggatgtaggggctgtccgggaacagggcgcatatttcatcaatgacgtcttccagaaaacggaaggttttttccgtgggggagaaggtataggagtgcacgccccaggtttcctgcaccctgggcgcatagcccgggatgtccgtattcccaagttccggataggcggcgatggctgcggaggcatggcccggcatttccacttccggaatgacggtaatgccccggtctctggcgtaccgcaccacatcccggatttcatccgcggtgtaatggccggagtaggggatgccgtctcccttattgcggttgccgatgacgggggattgagcccgggcgcctcccacagttgtcagcctggggtacttggcgatcgggaggcgccacccctggtcgtccgtcaggtgccagtgcagggtgttgaatttgtaccgttccatcaggtccagcacttttttgatgtcccgcacgggcatcatgtggcggcagctgtctaccatcaggccccgccatgaaaagcggggctggtcttttacgtccatccggggcagggccggagctccgtttttgtcggcagcgatgctttgaacgagggattgaagggcatacagggctccgttcacggaaccggaagcaatggagatggaatccggcgttacggcaaggcggtagccttccctgcccagggaagcgtcttccgtaaagatgatgtccgcgttgtttttaaccagggccgtgttgatcccgttgtcgcggaaaatccgttccgcctgcctggaaagaggatttttttccgggagcctgacgccgtttttcagggaaaacccgctttctccggtttggacgcgcatggcggcgggcaggggaatgatatggggcgcttcgagaaccggagcggatggggcgccccagcaaagggaaaacaggctgaaaaccgtggcggaaaaggtacacttggaaatcatagcgtacgtaaatacgcggcattttccgggaaaattccgtttcgaggttatttttgcaaatgcagagaaaaccggcacatgaaaatagcggttgttccgtccgggcgcctgtgagagtattcccgctctatgaatggagccgcttccccccgcatcaggaagacgatggtatttgtgctgctggcgctttttctgggccagttcggaagcggtgtgtatgatctcgttttcagcaatttcctgcgtgatgcccagcatcttgacgtggagatgcgcggtctgattgaattccctcgggaattgcccggcatcctgtctctttttgtggtcagcctgcttttcatgtttaatgaggtccgcgtggccggggtggcgtgcctgctgatgttcggcggcatgtacgcgctggctttctgcggcgccggaaccagcctgtggaccctgtccgcatggattttgacggtgagcctgggccagcatatcctgatgggcatgattgataccattgtcattcatacggcaaggccggaaaaccgcagcctgcggcttggccagatgaaggctctgggaacggctgccgcgctgctgggggcgctgtgcgtgtggatcaagtggaaattcaaccagtcttttgccgtggactttttcgtcacggggggcgtgtgcctgctggcgttcctgttcctgagccgggtgaagacgcccgtcttcccgcagcggcgcggctggaggcaatgtttcgtcttcaagcgcaggtatgccgtttattatgggttggaaattctgcacggcatccgcaagcagctttatctgacctttggtttctggctgatggtcagcacgctgggccagcctcccggatatatcggaaaaaccctgctcatggccggtgtcatcggactggttactcaaccccttatcggttggagcatcaagcgctacggggaacggaaggtgacgattttcgacagcgtggcgctgtccctcctgtgtctggcatacgccttcgcgccggagctgctgcccctgcattgggccgtgggggtagtgaccgcctgctttgtcctggacaacctgctgttcgccctgggtatggcccggagcacctacgtggcccgcatctgcgagaagccggaagacattacgccaagcatttacaccgggctggccatcaaccatgtggcttctatcgcttacggagtgctgggcggcgtgatctggatgaatacgggcggcccgcaagcggtgttcctgataggcggcgtggctaccgccggggccgggctggtggcgcggcgcatggacaggccgcagccttgacagggtacctaacgcacgggcttgcccgcaccttttttaaaggcatccatgatcttgctgaagatggccgtattttcataaatgcctgtgaaagcaccgcttcccgcgccgaaagcgtacaccggaacagccacaccgtcatgactgccggaaccgaaccgggccgttatttcacccttttcccggctgccgcccgtgagcgcgaatgcccccgtattatggtccgccgtgatgacgaccagggtgccggggtgtttggaggcccagtcaagcacggctcccgcagtccggtcaaaatcaaggagttcttccatcatttcttccaagttgttgctgtgggctgccttgtcgatgttggacccttcaatcatcaggaaaaatccgtcgggattccgggaaagggtgtccagggctttcagtgcggcttggcggaaaacgtctccccgcttggagggcgggggaagattccccggagcggtgacggccagtgtttttccgggaggcaaggcgccggcttcttcccaggtgcgggcgacgcggtatccctgcgcctgcatttcctggaagatatccctgccgtccggcctctgcgtgaagtatttgccgccgccgccaaagatgaaatcggcacgggaacgggggtaatccccaatgatgccgtaggcatccgatcttttttcattattggcgcagaaagatgccggggtggcgtcattcagctcgcaggtggcgataacgccggtggatttgcccatgtccgccgccttgtccaccagggaatccagcctgttgcccttggggcatacggcgactcgatgataaagcgtcttggttcccgtcgccatggcggtgcccgcagcggcggagtccgtgaccagcttgtccgcgcaccatgttttggaaatacccgtaaccgggcagttctcaataaataagcgtcctctgttggctgcccatgcggcggaaagttggtggatgcccatgccgtctccaatcatcaggattacgttggtgacgggaaggctgcggtcaggttccgggatttccgccaccggataggggcgttccagaatgaagcgctggttttccgccgccggaagcagggacggagcaagaaggagggcaaaggctaaaaggcgcagcggagaagtcatgcaatcactttcccgtctgcggcggaacaagtaaagaggaaaaaatatgccggtcccgaatggaaccggcatgaaccgttcaaaagggcttatttggcgtccgcctgtttttgcaggatgtcccggatctgttccaggaggacgacgtcatccggcttgggagcaggggcggccggagcttcttcgctcttgcgcctcagggctccgatcagcttgatagctacaaagacggagaaggcgatgatgaggaagtcaatggtcgcctgaagcaattccccgtattttaattccacatcgcccagcttcagcaccaggtatgccaggttgaccccggaagtaaggtagccgatgatgggggtgatgatgctggagacgaagacggagacgattttgttgaatgcgccgccgatgacgacggccaccgccaggtcaataacgttccctttaagggcgaatgccttgaattcttccagaaagcctttgaggttgaaaaaatgagccatagtggattattgctggttgcggtggttattctgccgttaaaatgataaaagaaaagaaaaatgaatgggcggcggacaaagatgtgactgtcttccggggtaaaatgcggcaatcatgacgtggttcccaaaaaaatcatttacagacggggccagaagagcaaactacgcccatattaccttaacttatgaacacagaagaaaagctcaaccagtacgtactccattcctatggccgttatcccatggctgccgtccgcggagaaggctcccgactgtgggacagcacgggaaagtgctatctggacttctgtgccagcattgcgacctgcgtgctcgggcactgccatcctgcggtgacgcaggccctgcaaaagcaggccgccaccctggtgcactgctccaacctgtaccagatcccccagcaggcggatctggcggaattcatcgtgaccaaatgcgtggagcgcccgggaaaagtctttttcgccaacagcggtgcggagtctaatgacggtttaatcaaagtagcgcgccgttacgggcaccgcaagccccagccggacggcaagccccgttatgaggtgcttacgttcaacaaatccttccacgggaggacgctgggcagcatgtccgccacggggcaggataaaatcaaaatcggctttgaccccatgctgccgggattccgccatttgcctttcaacgatctggaaacggcccgcgaagccatcaggccggaaacggtggccttcatgctggaaaccgtccagggagaaggaggggtcaactgcgtgactccgggatttctgcggggcttggcgcagttgtgcagggagcacgatcttcttctgctgatggatgaagtgcagtgcggctttggccgctgcggcgacatcatgggatggcgcgccgtagctccggatgtggaaccggacggcatttcctgggccaaggctctgggcggcggtttccccatcggcggcttctggatttccgaccgcgccattgacggccagggtacggagctttcctccatcatggatcccggctctcatggctccacgtatggaggcaacccgctcggcactgcggtaggcctggccgtgctgcgggaagttgtttcccaggggctcccggagcgggcgcggcgcctgggcgcggaaattcgcagggaaatagaatcctggaacctgcctgttgttcagggcgtgcgtggcctgggcctgttgctgggcattggcctgaacccggaaatggtggctgcgccggagggcaagacgatcgcctccgtagtggtggaggccctgcggcaggaagggttgctttccgttcccgccgggccggaaaccgtccgtctgctgccgccgctgaatgtcagtgaagaggaaatccagcaggctctggccatcatcaggcgcgtgcttaaaacgtacgccaaatagaatacagcccttatttgctttattgttatgaaggaagaagccattaaagcccccggcagcacgataaagcaatattccatcatgctccagaaccgggtgggggccctgaccgccctcctcggcctgctggacatgcacggcattttctgtctgggattcagcatgcaggactgccatgaggcgactattgcgcgcctgattgtcagcgatccggaaaggacgtcggaaatttttctggagaaaggtatttgctatacggagtccggggtgctggtggcggtgctccgccatggccccgcagacctcaaaaaatgcctggatgcgctgtatgccgcggaaatgaacgtcaactttctctatcccctgctgccttgcgtggggcgggggtctctggtggctcttcacgtggaggatctcaacttcgggcgcaccgtgctgaattccagcggcatcaaagtcctgttccagcaggacctcagccggtaggaacagccgtttcccccttcttctccgctgccctgttcaggagcgttttctccaagcgcctcaaggggttgccctgttttttcgccttgacgggaggggaaaacatggtatggtacgggccgcatggcaaaagtacccgtaatcaatcttcgcaagggacacgcggtcaattacaacaatgacgtttgcgttgtagtcagcatggagcacaagtgccccccccgcatggcttcctatgtgcaaatgagcatccgcagcatttccactaaaaaggtgtataaccttcgcctgacttccaatgaatccctggaaggcgtcaacctcgcccgtgaggaatatgagttcagctacattgacggcatgggttatcacttcatgaatccggatacatacgaagacatcaccgtgtctccggaaatcgtggaacccgtcaaggattatctgatggaaggcaatatctacatcctgcttttcacggatgaaacggtcgtttccgtagaactccccgccgccatcaccatggaagtggcggaagctcctgaaggcgtcaagggcgacagcgcgaacaatgtttacaaatccgccacgatgaccaccggactggtggtgcaggtgccccttttcatcaagcccggtgaaaagatttccgtaaagacggaagacggttcctatctgggccgcgtaaactgagttgcccctctttctgttctttgaagagccccgtccggtttgtccggatggggcttttttcatgccgcaatgcctgacctttttcctgtttccggaagagggcggttacttttccgcgcggtatggaatggttcctttatggggggaatcctttttctggtaaatgcgaacgtagtctatttcatatttctggggcagcggcagtttgtccagatctccgccggtggcgcccagagccaggttcaggatgatgaagtgaggctgccggaagggattggcgacttccttgtaagaggcgttgacggtattatccaggggagtccggttcagcagaatatcgtccgcatacaggcgcacttccttttcatcccagtccatacggaagacatggaagctgtccgcccagtccgcgtgtttttcctggagccatttgagcggcgtgtaagtggtactccatttggccacgtcctttttgggggagccccagcagagattggccagataggtggactggtagtactccatgatgtctatttccccgcacatgggccacttttccttgacgcccaaggtccagaaagcaggccacatgccttcccgcgggctgaatctggcccggatttcaaaccgcccgtacagccaggaaaatttgccgcgcgtcgtcagggaggcagaggtgtattccgcctctttccgtgccgtctgccagttttttccctccggatcgtaatgggggttggcatgtttttccttcctgccctcaataatcagcatgccgtctttgcaataggcattttccggctgataccattgcgcttccttgttgcggacgaaaccgtgttcgtaattccatttggcagggtccggacggccgtctttgtcgaattcgtcgtgccagacgagttcataatcggaataatccgctttttccacgactctctccgtttttttgacgccgtcaccatggagggtgtaaagctgggcgtggaggggggtggacaacaaggccgcactggccaggatgttgaatagaggaggaatgttcatggaagaaagtaaaggtgtttgttactggtacggggccgcgggcgtttttttgtcattttttatcagagggggctgaagccgcgaaagcggcttgaggaacggaataaatgtgttaggttcggctaacagtatggggtcttgtctggacccggaacatcaaacattccgttttaatgacaatggaagaaaagaactatcttgtttccggtatgcattgcgccgggtgtgccgccaaggtggagcgcgccgtggaaggattggagggggtggagcgcgtagagctgaatttgctgacggggaagatgaccgtcttgtttgaaaagcctgattcccccgccatggagcggatagctccggtggtggagaaagccggcttccgcctggcggactggaaggaggagccgcttgccggaacggagagggaggaaaggctggaacaggaggaaacgggcggctcccgcctcgtttggtccattctgctgctggttcctttgatgtatttgtccatgggccccatgtggaactggcccgtcccgaaagggagttgggggctctggatgaattggtggacacaaggcattctggcgggcgccgtcctgtggctgaaccggcattatttgataaacggcgtgcggcagcttgtggcgctgtctcccaatatggattccctgatcgccatcggttccggctccgcttttctgtatgggctgtatttgctggttgcggggatgtggcagggtttcagtgtggagggaatggagctgtattttgaatctgcggccatgatcgtcaccctgatttccctggggaaataccttgaacgccgctcttatcggaaaacgaatgccgccgtaaaagggctggtgaagctggttccccaggaggcgctggtatggcatgacggcgcggagcgcgccgttccgctggatgaaattcgttccagggatctggtagtggtgaaaaccgggcagcggattccggtggacggcatgattgaagaggggcaggcggctctggatgaatcggacctgacgggggaaagcatgccggtggacagggcggcgggggaccgggtgatcagcggaacgttcaaccgggccgggtatctcaaaatccgcgcggaacgcgtgggcggggattccacgctggcccgcatgatccgcctggtggaacaggccagccagtccaaggcgcccattgcgcggctggcggaccgggtatgctatttctttgtccctgcggtcattgccgttgccctggtatcgctggttgggtggatggctgccggggaggggttttccttcgccctcgccagggcaattgcggtgctggtgatttcctgcccctgtgtcctggggctcgctacgcctatcgccattatggtggggacgggcaggggcgcgcggctgggcatcctgtgcaagtccgccggagctctggaagccctgagccgcgtggataccgtcgtttttgacaagacgggcaccctgacggaaggggagccgcgggtagtggccgtgctgccggaggaaggcatggatgcggacgcgctggtggaaatggcggcggctttggaacagggttcggaacatcctgtaggaaaggctgtttatgaacacgccaggcttctgaatttgcctgtccgcgccgtggcggatttatccgtggttcctggccgcggcattgccggaacggtggatggggtgccttatgcggtgggcaattccggattcatgcaggataagggaatttcctggaaggaggatgaaagccgcctgcgggagttcatgcggcagggcgcgtccccgctgtatgtgggcaggggcggatgccctgccggcgtcatcatggtggcggattccctgaaaccggacagccgtgcggcggtggacagtttgaagcggatgaacctgcgcgtcgtcatgctgacgggggacaacgccgccacggcgcggcacatggccggagaactccacattgacgaggtggtctccgacgtgcttccggatgaaaaggcctcccatgtgatgaagatggaggaacgtggggacaaggtggcgatggtaggggacggcgtgaacgacgctccggctctggcctgcgcccgggtgggcatttccatgaagtccggaacggagctggcgatggaatcctccgacatcgtgctgatgaaaagcaaccccgcaggcgtggcggaagctgtccagctgggccgcaccacgctgctcatcatcaggcagaatcttttctgggctttcttttacaacatcatcggcattccgttggccgccgggtgtttatatcccgccttcggccttacgctgaatcccatgattgccgccggggcgatgagtttgagttccctgtgcgtcgtattcaattccctgaggctgcgggggttcaccccacgtctggggagcctggggaaatagggcggcctctcccccaccggcgtttcccgttcaggagggctgcagcagggcctgggccagcgtgcgtgcgtggtctccgccgccgcccagcatgcggaccagttcatccacccgttcttcatggctcacctcccgcaggcaggagatggtgcggttgcccgcggatgctttctgaaccaggtaatgatgggaggccagggccgccacctgcgggaagtgcgtgatggagatcacctggtgcctgtttccgagctgctgcatcttgaatcccacagcccgcgccacttctccgcccacgttggcgtctatttcgtcaaataccagcaggggggtggcatccttgtgggccagggcgcttttaatcgccagcatgatgcgcgccagttccccgctggaggcaatcagacggagaggcttggagggttctccgggattggggccaaacaggaattccaccgtttccattccctgtgagcccggttcctgaaggggggagaggctcacttcaaagacggcctggcggaatcccagctcccgggagtgcctgacgatggaagccgccagcctgggcgcggagtcctggcgcgctctggtcagagcctgcccggcggcgtccatctgcttgcgcaggacggcgatggaggccctcagctcttccaggcgttccgtgcggtgttcaatgcggtccaggcggctggccgcctcctccctccgggagcagacgtcctcaaaggaggggccgtatttcatttttagagattccagcaggttgatgcgttcctccagctggaaaagttcccgggggtcgcagtccagttcggcggaataatccgccaggcgtccctcaatttccttgagttccaaattcactcccgccaatggagccagccacgcggcggtggaggcgtccatgcgttccagctcatgggccgcccgtgtcaattccctcaattgggtccccaggccgggcacatccgtttcctccagcatggaaagcattttggagacctgttcccggagccgggtgccgttgcgggcgcgctgccagcgttcttccagcgtgagcacttcttccggagtgaaggcggcggaatctatttcatccacctggtggcgcagcagttctatttcccgtgcggtggccgcttccgcatgctccaggtcatcataggcccggcgcgcatcctgccattgcctccaggcgtccgaataggcgtgcaccaggggagcgtgctccccgaaggcgtccagcagggaaagctgcctttcctgggagaccagggagcggtggtcgctggggccgtgcatgtccaccaggcaggctcccgcttccctcagcagattcagggtacacgggctgtcgttcaggaactggcggttggccgtggaagagatgaggcgcttgataatcaggttgccgtcttcgcagggcgggacgccatgttcgttcagaatggcgtgcacgggggaggattccggcagatggaacacagcttccacgctgcattgctgttccccggagcggatgagcgtcttgtccgcccgttctcccagcgccaggcgtatggctccaataatgacggatttccccgccccggtttcccccgtgatgcagatgaatccggaactgggttcccagagcagctggtccacaagggccaggtttttaattttcagcaatgtaagcattcgggctttggattttgaatgcattatggcatcatttgccctaaacgcaatcatgacctctgtgatgaacattctctttttgggcacaggaacgtccaccggagtgccgcagataggctgctcctgcgcggtctgcacgtccccggaccccagaaacaggcggttgcgttcttcaatttatgtggaggccgctggcacccgcctgctgctggattcttccccggatttgcggcagcaggccctgcgggaaaatatcacggatgtggatgccgttctttatacgcatgcccatgtggaccacgtgggaggttttgacgatttgcgcgccttctgctggcgccggtccggcggcctgcccatgtatgcttctcccatgacggtggacgccctgcggaccatgtacggctgggcgttcgttcctaaaccggggcggagcggctacgtcaggccggagcctcacgaggtaacggctccgttccgtgtggggaacgtgctggcgacgccccttccggtgctccatgccggggtggagacatatgcctatctcctggaagcggaaggccggagcctggtttacatgccggatgtgaaaagcatcccggccccgtccctggagaggatgaaaggagtggatttgctgattattgacggattgcgttatcatctgcaccccacgcacatgtgcctggaggaaacgttggccgccattgccgccgtccggccccgccgcgccgtgctgacccacctgtcccatgatatggattacgggattctttccggcaagctgccggaaaacgtcatgcccgcgtatgacgggctgagactgtccctgccgtaatgctcacgctgcatgttctcaggccatgactattccagacaattctgaccgtcccggcgcgtggataccgtgcgaaaccagaaacgtattcggcttttccgtagccgtcagttccgtggaagagatgtccgctgcgctggcggaacgcgcgctggaggcggaagctccgtttctggtggccgcggcggatgcccatgtggtaaccctcggcgtgcatgaccgggattacgggaacgtgctggaacggatggacgtgatttgcccggacggtatgccggtagtgtggaggctgaaccggaggctttcttccggggaaagggaagcgtgccgcgtgagcgggccggatttgatggaagcgctggtgcgttcgaatgtgcaatatccgggcttgcgccattttttgctgggcggggatgagaagctgctggaagccctgtctggggcattaaaggaaaaataccccggttttcaactggccggggcgtattcccctccgttccgcccttggacggaggaagatctggaaaacatgcgggaggcggttgcttcaagcggggccaatgtggtatgggtggggttgggctgcccgaaacaggagcggtggatggcggagcagagggaattgctgccccccgcggtttatgtgggcgtaggggcggcgttcgctttccatgccggtacggtgaaacgggctccgcgatggatgcagaagaacggtctggaatggttgtaccgcatttaccgggagccgggaagactgctcaggcggtacgtgaagcacaacagcctgttcgtgtggtacgtgctgacgggcagatagggccgtttttccggtgtgcgtcccggagtagagccgcgggttattttatccttgtgccgttttcgtgcggccctatcatgattccgtttgaacctggacggaagtggtgggcgctcttccctccttcgtctttaaccttgtttttcttatgttctttcgccgtattccccggaaaagctggtatgaaaaaactgtggaacgcgttttcagggacaggaaactgtgcgtggaaaagctgctctccttcggtttcgttcgtgtggaaagcggttttctgcgcagggcagcattgctggacggccagttctgcatggaattggcaatacacgcggacggttctgttcatgcaacggtgcatgatgcggacgggaagaatatccggcatgctgacccgggaacggaggacaggttgcggacaagaatgctccgcagggaatatgaggaagaactgtggcatatggcggaatgctgctttgaacctgattttttcaaggcggctcccgcccggagcctcatcgcgcacatccgtaaagcttacggggaggaactggaattcctgtggaggaagtttccggggaacgcagtggtgcggcggaaggatacggaaaaatggtacgccgcttttctggctgtgccgcgcttgaagctggggggcagttccaaggaacgggtggaggttttgaacctgcgggtttgtcccggtgagtccgggattcttgcggataatcgcagccgttttccggcctaccatatgaataagaaaaactgggtgagcttctgtctggatggaaccgttccctttgaggaactggctgcgcgcctggaaaccagccggaggcttgccggaaagtgagcgcctccggcgcgggagtgccgggagaaaccgtcttcccgcccccggatggacggccggaaagggggtcttgacccggaaagaggcggagcctacagtaagggcatgaacatagaagaaaaagctctgtccaccttccgcacggcgccctggcgccacaactgcgcccaggccgtctgcgcggccctgggcagggaggatttgctggaaaccgtttcctcctgcggtaccggaaaggctccagacggcctgtgcggcgccctttacggggcgctgctgtgtacgcccgtgcagtccagggaggagctgaggcggcggtttgtggaaaagctgggctattcccattgcagggaattgaaaaaagagaggtccgtgccatgccgggattgcgttgcctctgcggcggttctggcttttaacctgagggagtgaacgcagaatgacactgccggattcatggtttttcatgaaaaaagagtctattggaatgaacccagatagaataacatcatgaaaaaattgatctatatgatagcggcagcggccgttgcgattccggtggtggccctggcccagggagcctgcggcagcggctcctgctccaagggagacaaggacatggctgaagccaaagagcacatgaaagaaggcgccaaggctgccaaggacgccgcctccgaaaaaatgaaggaaggcaggcaggctgccagggacgcctatgaaaagggcaaggaaaccgccagggatgcttatcaggacagcagggacgccgttgaccatgcggcggacagggctgccgataaggccgaagccgtcggtgacgctgtgaaaaacggttaactcaaacgatgaacaataaaaatatttgcttattatgtgcgaatccaaggatcatatgaataagggctgcggatgtgcgaacgatgccgcttccggcaaaatggaggaaggcaagcacaagatgaaagacgcctgcgaaagaggcaaggaagccgtcaaggacatggctgaaagcgtgagcgacaaggccaaatccatgatggacaaggataagaattcttagtcccggcggcggttgaagcaagccgtttcccattcttcctcccgtgcgcgggacgacctccccttgtccggatttccggacgaggggatttttatgcgggccggttttccggggaaggggtgtcctgttccacgggctggagggcatgcaggctgattttatgccttttgcataattcctccacccggtcgcgttccagtaagatggttttgcccgcttccagggcgatttgcctgacgccgcattccgcgcacgtttcaatggtgacggggccgactgtcgggatatcaaagcgcatgtcatgccccaggcgggccactttggccagcgtggccggtttgccgttgcccagttcccctccgcggcgtatgcagttgttggtgccttcaatcgcttccacggcgatgacggtgccgccgtgcacgatgacggactgcccgatgtggagacggctgatttccttggccgtctgcatgccgaagcgggcatcctcccattgttcaggcgtgggaggaggtccggcgatatgccccggctgcggcatgtgctcctccatgtaggtggaggccgggaggatggtgaagccttccttttccgcttccgtgatgacggccccaagcagggagtccgcatttttttccggcatgcgcatcaatacggaaagggcgcggagatccggacggagggaaagaatgttcttcggattgatgccgccgaccatgatgacgttccttacgccgtgctttttcaggaaggtgaacggcttgcttatctggcccacgctgaattcctggtaagcgtcgcacagggggatgacggcggggttggtttcccccttgaaccctacggccacgatacgcaattccggcgtccggcggcgtgcgccccggacaatatattccggataaacgccgtctccggctaccaggcctaatacgggcgggtctgttgtcatgcggcgtgaagctggggaacggggctgattacaggtattccgggcgctggagcaattccgccacgcgcttgagcaggcggccgatgtccgctccgtccaccacgcggtggtctcccgtagccacgatgttggccttggagatggggataaacgcctccacttcgtcactccagaccggggttttggtgacggcccccacccccaggataatggattcgctgggcatgggcatgggcgcggcaaaggtgaggccgaagccgccgaagttggtgaccgtggcgatgccgcccgtgctgtcttccggagccagcctgcggcggcgtgcctgggcaatcagcctgttatagtcttccagcagttcttccatcgtccgttcgttcacgcggcgcagtacgggaaccatgacgccgtccgccacctgggcggcgatgccgatgtcaattgttttgggagaaagaatgttttcccccaccaggtagcaagcgcattccgggctttccgccagggccagggccagggcgcgggcaaagtacagggtgatgccgggccgcagcggggaattttgcctgtgcttgatgagggggtccatgaatacgggacgcccggcggaggccagcgggcgcgtccagctgcggcgcatggcgtccgccacggccagccgcatggatgaggccttgcggtgcggccattggctgacatattccaggaattcttccaggtcgtcaatggtgacgcgtccgcccgccccggaaccggagatgaaagcgatgtcggaggcgctcatgcccaattcatccatgcgcgccttcatccggggggacatgtagtgcgcgcccttcatgcaggcgggtacggggaggccgcgcacgctgggctggactttcaggtccgttccgttttcctgataggattcccccgtcaccccgaagtggacgcctgcgggtttttcctcccggggaggggcggagggcgcggcctggggaacggattccggactggctggaagggacggctgggtggaatctccggccggagtcgctccggaacgctcaatttcctcttccgtggcctcaatcatggccatgcaggcgccgaccacgacggattccccttccttgatgaacacatcgctcaggatgccgccgcacatggtggtgacccccatggtggccttgttggtttctacctcaaagatttcctggtcggcttctacggtatcgccctgggccgccagcaggcgcagcacagtggcttccgcaatggaatccccgagctggggcatcagaatgggtactttaggcatgatggaaactgggttgaatcaaatggatagaagatggcggatggaggcggcaatggattccagcgtggggcggtgcgccttccagaggttggggtgctgggggatgggggtatcccgtgcgttgagcctctggggcggggcatccagcaggtggaagccttccgcgacaatgcgtgaaacaacttccgccgtgacgcctccccacggaaaatcttccccgacgaccaggacgcggccggtgcgcgctacggaggcgataacggtatccatgtccagcgggcgcaccgtccgaagatccacgacctccacttcatagccgctttccttctcaagcagatccgccgcacgcacggcttccggcaccatggcgctgtacgccaccacggtggcatgcttccccgtgcgggcgatccgggccgtgccgaacgggatgaccggggcttcccggtagttgtcctccgccttcagccagcggtacaggaacttgtgctccagaaaaatgacggggtccggaatttccacggcctggcgcagcatccagtaagcatccgctaccgtggccggagtcatgacgtgcaggcccggataatgggcgaacaaggcttccaggctctggctgtggaaagggccggtgccgggggttcccccgcagggcaggcgcaccgtgatgttggcgggaatgcccgtgcggtagtaatgggtggccgccatgttgacaatctggttgaaagcgatcgtgctgaagtcggcaaactggacttccataatgggcttcttgcccatgacggcggccccggtcaccatgccggccatggcgtcctcactgatgggggcgtcaatcacccggtccgggaacagatccttgaggcccttggtcgctttaaatgcgccgccgaaaacgcctatgtcctgcccgtacagaaagacgtccctgtcttccgtaagcaggtctttctgggcgtcgtggatggcatcaatgtatgttacgctcatgggaatattccgtttgctggcttaataaggtctccataccgtggcgttccagtcttcccggaaggggtccggttccggttcccgttgcgcggtggctacggccagctggacttcatcggcatactgttttttcaaagccgccgtttcttccggcgtgagccagccggcttccagcagctgccgttccgcgactgccacggggtcttttttttcatattcctctttcagctccctggggatgtaggaggcgtcgtcatgttccccgtgcccgcacatgcggagggtcttggcaagcacccactgggggccccggccttccctcgcgttattgacggcggtccggaaggtttccagcgtggccatgaagtccgtgccgtccgtttcatgcacggtgaatccgtagccgcggcccctgtccgccagggaggcttctccgaattccctgatattgggggtagagtaggcaaattgattattggttaccacgagcaccagaggcagccgctccacgttcgccatattggcggcttcgtgaaaagcacccgtggacgtggtgccgtcgccgcagaaagctactcccacggggccgggcagtttgccgtccaggcgcttggcgaaaaggcagccgatgacgaaggccaccgtgctgcccagatggctgatgggagccatatagccttccgctggcaggccccggtggacattgccgtcccgccctttcatatatcccagggcggaacccaggtaggcgcgtgccgcctcaataatcggttccccccaggtgacgcgtgccgcctgttcccggatgaacggggcgattacgtcatagcaagcagtcagaaagacgcctccgcatgcggcaatcgcttcatgtccgcggcccagataaacgccccccgtaattttgcccgctttgtaaaggctggaaattttggtgtcaaaggcccgcgccagcaacatggccttgaaagccctgacggcattttcctttaagtccggttgtgtagtgtcgcaatgtgccaccccattattttatatgctgcataaggaaatgcaatgccatttcatgaaactgcctgagactttgtgtccgcaggcgcggggccgctccgcagggcggcggaagttcgcggggggcggttcccggctggcgggagcgcttttccatcttccgttcccgccggcggatgcgcggaaatttccggatttatttcccacccggcggcaggctgcatctcagttcgaatttgggatttgccacatcgtaatctccgggaaacaattccgtctccataatgattttgtcatattcctgcgcaaaaaggtccggaaaaatgccgggcgcctccgcaatgccgcttttctgcctgatggcgcagagaaaggaggcggcgggcagacgcatgatttccttcatccgccgggcgtctcttccggccgcttccacctccacatacaggaactgctccgtccctgctttccggtggaaggaaagcaggccggcctccgcgcccagccgcagctggcagcggtcaatatcgtcaaagatgcgggtcatgaggatgttaaattccggagtatgctgttttcccgcatagggcgccacccagcagtatttttccggcaatgcgtggatggcctgttccccatgaagcagaagatcttcttcccggtccatctgtttccggaatttttccagcaggcgcagcttttcctgaatatccctgattttccggtgcgccagcatggtgccgtgggagaaaagtttcttataatggatccttcgctggtccctggtcaggaagccggtaaattccttcaggggaatatccaggaaaatgcaggcgcagatggcatgcaccacgggaatctgggaaagagtgtagtaacggtatccggtgtccgggtccgtataggccgggagcaaaatgcccagttgttcataataccggagggatttgacatgtacgccggtctgtttggacagattgccgatggttagtaaattctgtttgtccatcctgtattgcggttggtgggagggaattgattgtttccgccggaagagccccggcggaaacgggagctgcgcgcagaaaaaaactttctgaagacgaagttatttctgtcattcatagggtttttattgtcaataatttacaataaatgacaaaaaccctccccacttaatttttccattgcctcttgactctcccattatgggatactttacatcatatggcaattgaaaaatccccggtcttgccggaagtgcggttccggggtttcttgaggttccaaacagcgtgattcctgatgaaaataattaatcttttattctgcatgcccctgctggtggtttgcttctcctgccagcgggagggtgaaagccaggcaggcggattgcccggcgaaaccgtgccggaagtgtctgtcatgacggtacgcagtactcaggttcccgtaaccgccaatcttcccggccgtatggaagcgtatctccaggcggaagtgcgcgcccgcgtgacgggaattattcaggaacgctgctatcaggaagggcagacggtccggccgggcgatcttctttttaaaatagacccggctccgcttcaggctgtcttggatgaatgcaaggctgcagtggctcgtgccagggccgttctgtcggatgcggaggacaaggccgcccggtattcctccctggtcgccaagggcgccgtcagcatacgtgagcataagcaggccagggcggaggaagagcgggccagggcggaatatgccgccgcggccgcctctctggagcaggcgcgcctgaatctggaatatacccgggtggaggcgcccatctccggccgcgtgcgccgtgccctggtgacggaaggggcgtttgccaaccagaatgaattcacccacctgaccaccattgaacagattgaccccatttatgtccgcttcagccagcaggcctcccagtacagcagcctgcgccgcgccgtcgtatccggattgtggaagggagtgccgctgggcgaaatcaaggtgcgcctgctgctctccaatggggaggaatacccccattccggcaggatcattttttccgacatggcggtggacccgaatacggatactattgaaatgcgggccctgttccccaacccggatcatgaactgctgcccggcgcctatgtgcgcgtggtatttgacagggcggtgcgggataacgtcttcgccattccccgggatgccgtcatccgcaccgcgcagggcgcttccgtctttgtcgtgggcccggaaggagtgctggaagcgcgccccgtcagggcggatacgctgaacggccgggaatggctggtttcagaaggcctccgggatggggacagggttgccgtcagccacacgatgtccctccgccccggcatgaaagtccgcagcgccgccgcccggccgcaaccccatgcccagcaataaaccgccatgcctgatttcttcatacgccgccccatttttgcctgggtagtcgcactcctgatttccctgatgggccttctggccattcccagcctgcccattgctcagtatccggacatcgctcccccggtcatcaccctgcgcaccacatatccgggggcttccgcccgggatacggaggaagccgtgaccgccgtcattgaaaaggaaatcaacggagcgcccggcctgatgtacatgtccgccaccagcagctccgacggagccgtggaaatagccgctacgttcacgcagggcacggatccggatattgccgccgtagaagtgcagaacaggctgaaaatcgtggaatcccgcctgccggaatccgtccggagagaaggcgtgttcgtggaaaaatcatccaacaatattcaggcgatgatttccctctcttctacaggcagcctgaatgatacggagctgggggaatgggcttccgcccgcatcatcccggaactgaagcgtgtgaaaggcgtcgggcgcgtggagcttttcggtgcggagacatccatgcgcatctggccggacccggaaaaactggaggctctgggcctgacccccacggatattgtcaatgccgtggctgcccagagcgagcgcatcatcatcggggacatcgggggggcggccgttcccgaatccgcccccatcaacgccggcgtggtggcggaggacgctttccgtacgccggaggaattcgcctccattgcgttgaggacgctttcagacggttcctccgtcaaactgggggacgtggcgagggtggagctgggcgccaacagctacgcgttcttttcccgctgcaacggccagacggccaccggaatggccatcaagatggctcccggctccaatgccgtggaaaccatgggcctgctcaaggccaagatggatgaactgtccagggatttcccgcccggagtctcctaccagattccctatgaaaccacccacttcgtggaaatctccatccggaaagtcatttcaaccctgctggaagccgtcctgctggtgttcctggtcatgttcctgttcctccagaacttccgggccaccctgattcccacgctcgtcgtccccgtagccctgctggggacctttgccgtgatgtggctctccgggttctccatcaacatgcttaccatgttcggcatggtgctcagcatcggcattctggtggatgacgccatcgtggtggtggaaaatgtggaacgcatcatgatggaggaaggcctggatgcccggcgcgctacggtgaaagccatgaagcagatcggcggggccatcgtgggcatcaccgccgtgctcgtggcggttttcgtgcccatggcctttttcagcggagcggtggggaacatttaccggcagtttgccgtaacgctcattgtgtccatctccttctccgcgtttctggccctttccctgactccggcgctgtgcgccgccatgctgaaaccctcctccgtggagcatcaggagaaaaagggttttttcggatggttcaaccggacgatacaccggtccacggaccggtacggccgtgccgtatccggaatgatccgccgccctgtgcgctccctgttcctgtatgccctcattattgcaggggccggctatttgtaccttacgctgcccacctccttccttccggaagaagaccagggcaacttcatggcaatggtgtccctccctgccggcacccttcagaaggaaaccagcgtgcggctgcgggaagtggaggattacctgatgcggcatgagccggtggagcacgtttactccgtgggagggttcagcttcatgggttccggaaccaacatggccatgctgtttgtcggtctgaaaaactgggacgagcgtcccggagaaaacagttctgtccaggcgattattgaccgtgtcaatgcccgctttgccggagacggccagatgatggtcatggccctgaacatgccggccctgccggagctgggcaattcgtccggattcgacttccggctccaggacaagggcggcctgggatatgcccgcatggcggaagcccgggacgagctcctggcccgtgccaacgcgaaccccaatctggcgggcgtttatttctccggccaggcggatacgccgcgtctgcacgtctccattgaccgggaaaaagccttttctatgggagttcccattgcggagatcagcaattctctggcggtcatgttcgggtccagctacgtgggggatttcatgcatgacagccaggtgcgccgcatcatggtgcaggcggacggaaaaagccgcctgaacggaaacgacattgaggacctgcatgtccgcaatgaccaggggaagcttctgcccctttcctcctttgtcaggctggactggacggcggggcctccgcagctcacgcgctacaataactatccctccttcaccatcaacggctcttccgcgcccggcaagagcagcggagatgccatgaacgccctggaacagattaccgcctccctgccgcagggcgtggggtttgaatggacggggcaatcctatgaagaaaagctggccgggtcccaggccacgctgcttttcggcctttccatcctgattgtctttctggtgctggcggccctgtatgaaagctggtccattccgttggccgttattctggtcgtgcccctgggactgcttggagccctgctggccgtcttcctgcgcgacatgcccaatgacatttacttcaaagtgggcctgattacgaccatcggcctttccgccaagaatgccattctgattgtggaagtggccagggaattttaccgggagggcatgaatgcggcggaagctgccgtcgccgccgccaaactgcgcctgcggcccatcctgatgacctccctggcgttcggggcgggcgtcattcctctggcgttcgcccatggggcggcggccggagcgcagcgcgccgtgggcaccggcgtgctgggcggcatcattacggccacgctgctggccatcttcctggtgcccctattcttccgcctgacggccggaaagagggggccggatcatccggaaggaatctgaggcaggattcccgctgcggaaaatttttcgtgaacgccgccgaagcgggttgccggagcgcgcttatttttcctgtggcaaaagccgcggaaaagagaattattgacaggcgcatttcgaatccgctgtcaatcctattattttagtaggaaatatattttttcatgccgccatggaaaccgcatggtttgcataaatggaaatatattgatgataaaatagttgtatttctttttcatagttctccggatatcgactgccgctgttctccgggggggatggcgtgcgcctgccgtttccggcaggatctattttggaataagcgggatattttctaaaactttctctgtcaaaacgccatttaaacagcggattcgaaatccgttatttagcggctttcccaatattaacgattcttattaaaagatatgagacttactcttccatggccgttgcgccgttttctgctgggggctcttctgtgttccgtaacgatggcgaccgccgcttccggggcggaattcgtggtggacgccgcccaggcaacagacccgtccgggaatgtgtaccgcacgcttgacgaattggcctcttccggggcgctgtcttccggggataccgttatcctgtgcaatgatgattcttctctgacctcaaccctgaaggtagctgtccatttccgttccaatgatccggaggtgtcccgcaccatcagcggctccccaagttctttgtacagatttaacagaatgcccatcaggcccggctcccagacaagtcccgatatatcgggagtacttgatgaaaatggagctgccattctgaaaatggattctatcattctgaatggaatgtcgataatgacatcgcattcattttctccctgtgtaaaaataacgggcaacgtccagtttgagaattccctagcacatgccatctcctcctgcagagttgacttggacggagccgtctcgatggcgttggaaggccgctttgttttcttaaataataaccatgctctccatgttgtagacagaacaaacttggtgataggagacaacgctctgttccggggaaattatggcaacagggtgaatgagggtggtgcgattatgagttacgggggacatgttatcataggagatcatgcggtattcgacaggaattatgtttccaacgtggagggttcttttggtggtgtattttatgattgcgtttttgcaggtgcaataactgtaggagcggatgccgtttttaccggtaactttactttcagtaccgacggaaatgcttttgggggcgcgatggcggttaggaaggatggattgcaaaatgcagcagaaacaggggcaataaccataggacccaatcccagtttcatcaataattttgcttactccggaaagactgctgcttatggcggtgtgatttacagcgatggggatatttctttcagcgacggaggcatattcctcaacaattatgccaaaacttccgggggagccatcacgatgggagggaaatgcgacctgctcgctctgacgaaggacgcgcttttcagcggcaacatgaccggagacgtcttcacccgccatgaggacggcaccttctccgtggaaaacggcgtggccaatgccattgacatgaacggttctttgttttcttcactttatacgcccaatctgacgcttgccgcggaagagaggcgtgaaatccgtttcaacgacccgattaccagccggaacgaagaccccggccgccctatgaccctcacgctcaaccgctacacggacggggaggggaatgttcgcgacacggatggaacgatcgtcttcagcggcgaactctaccagggagaagatacgcatcttgccgccagccggtacaacagcttcctcgcggatgccaccctctatggcggcgccctcctgctggaacacgatgttgtcttcggcaggaatcctgaggaaataacggataaacgatacaactcctccctgacggtggaaaaaggcgtgctggaaatcaccggaggaagcaaggccaacgcctccagcttcaccctctccggccctggcgccgtcctgcgccccggggagagcgccttcatcaacacccacaacgccgacctttcccacggcttcaccttcgatatgcgccaccagctccaggccgggccggtcttcggcccgggcctgatgctctccgccctggactcctttacggccggggggtacatcggcgtggcggacacgggagccaacgccccccggttctacgcggaccgctcctggaagcaggaccgcgtcttccacgtgctgacggatgtgcagcacatccatgagggagactttgacggggccgtctcccaggccactggaacggcccgggtggatgacccctacgcctacacgggaacctggagccaccggtggacggacgcggacggcgacggctacgccgaacagctccagctggtctggaaagcggacggaacccccatcagccgcgttgacccggaactggccggggaactggccgtcaactccctctggagctcggcgtccaacgcggcggccctgggcggcaatgtcctctcccgtctgagcgtgccgcgcctgaccgacaggcatgcccgcaacctgtggggcatggggctgggcgacttcgcccggcagcgcagccggggaggcgtggacggctacgactacaacggaggcggctactccgtgggggcggacagcggcatgggaggggaggacgagggcatctgggggatcgccttcgggcagctctacggccatgccagaagccgggacttccaggggcgcaacacgcaggacacccggatgggctccctgtactggggccgcctgatggaagaaagcaacagggcgtactggatcttcaagggaagcctcacgtgggcggaaacgcgcaacaacatgaccagccgcctgagcggggcgccagcctccaggggcaaatggaacaacgagacgtggctggcgcaggcggaagtgtcccggacggcggactgtgcgggagggtggaggctgacgccgttcgtgaggatggaattcacgcacggccgtcaggacgccttccgggaacagggagggtatggccgtgacttcggaggggcggcgctgaaacgcctgtccattcccgtgggcctggaaataggcaggacggacgaatggaaggggaggccgtgggcgcagtcgctgcgcgtgtcctatgtgggggacgtgctgagggacgtgccggaagcggcggtgtacagcccgtacagcgacatgggctggagaggaagggcggtgagcccggaacggcacggcctgcgcgcggagtacaacacgtccctgcagtgcaatgagcgctggagcgtgtacgggggctacgggctggaagtgaggggaagctcctgctaccaccgcgtgaacgcaggggtgtcccggagtttctaaaagaaagcttcaggaaacggaatgaaaaataatgatattattattcgatgaatctgcgtagaaaactggcatttgccgtcatggccctggccattccttcatcatgggcggatatcccggaatcctccgtatcctccgcggccgtctttgccgttaaaaaagcctggcccagggccggcttcattgaatgggagctcagcggatcaggaaaactttatgaagctgaattcaacatcaacggttttgaatttgacgtcaaagttgaccctgaaggaaagatactcctggtcaaggaggaaatagcggtatcggcccttccggggccggtccgcgcggccgctctgaaaccgtacccgggcggcagaatcaaagaagcggaaaaagtgacggaaggaagcgtcatccgttacaaggtggaagtggtggatcatctggatgattacgatgtcctgctgactccggagggcgatattctttacgtggaccattgaacggcttgaaccgtctacagccggaaacaggcgcagccctgccaggtaaaaaccctggcagggctgcgttcttccttttcagaatattcagtcgtcccgcggggctggatgatgcctgtttttccattgccccccggcgcggcgcatgcgctcaagcggaggtgaaggccaggcggcccggacagttccggattgagcgtcccggggatgtttcctccgccgtacggcgcggaattattccctgccgcgggcgttcaggaaaatgaacacgtaatacagcagcatggctagggaggaaagcgctcctaccacgtaagtcatggcggcccagaacagggcgctcttggcctttccatggtcgaaatagttcatcaggtgggagcggtccagccatttcagggccctggcggaggcgtcaaattccacgggaagcgtgatgaacgcgaaggctgtggtcacggcaaacaggccgatgcccagccccagcacccacggagagccgcccatggccagcagcacaatgccgatcatcagcacaatgcccaccaggttggaggagagctggacgatgggaaccagcgcggaccgcaagcccagccagtggtaagcctgggcgtgctgcacggcatgccctacttcatgggcggcgacggcagcggcggcaatgctgttggaattgtaaacggactcgctcaggttgacggttttgtccgccggattgtaatggtccgtcagatggccgggcgtggaaatcaccttcacgtccgtaatatggttgtccttcagcatctgctccgccacctgcctccctgttacgggaatggaaatctgggagtattcgctgaagcggctcttcatgcgcgcgctgaccagccagctcagaagcatggagcccagcagaatcaaccagtaaatggtataggaatgcgttggggcggtttccgccgtctgtaccgtataagaaaggagatcgatattgaataactcaatcattgcaaatttgaccttatatcatcaggctttgttgaatccagagggcgccgtgtcagcctccgggggagtcccccggcttctgtcatacggaaatgtgcggaaaaacggagaattcaatcatccgttttttgggagaggagcttgccgtccggcgaataataaagctccactttgcgcacggcgggggattcggaccggcagtccacccggtacttcaggactccccgggcggtaatctgcctggcgcggcggagggcataccccgggaaatcgcgggcgatggccgccgtaacgggggctggaagatactggagggaaatatccgctttaaccaggctgacagtgccgtcgggatacaatttcacctcgtattccagtccattgaggtggaattcggcttcatagacatcttcgtcattgtcgaaatcccattcaatggcgcctgcgttcggatactgcttctgtacctgctctttcacgggggcgggaacgcgggaggccgggatatccgccagggcgggcaaagtgaatgccgcggcaagagtagctgtaaggatgcgtgaaatattcataaatacggaataattgtatttattaaaaaaacaagaatcttttgcggatgttttgtgacaatttagccatcaatgaaatgaatccgggcatggcggggtttcttgtcgccaaaaagcggatggtggagttgaatggcggcatgcaacagggtattgtctatttgcttggagcgggtcccggcgaccccggcctgataaccgtccgcgggcgggaactggtgggaatggcggaagtgctggtatatgatgcgctgagttcggcggaaatgctgaactgggctcctgctgcatgcgaaaggatttttgtgggcaagcgggcttcccgccacgccctgccgcaggaggaaatcaacgccctgctggtcaggctgggccgtgccgggaaaaaagtggtgcgcctgaaagggggcgacccctacgtcttcgggcgcgggggggaggaggcggacgccctgcatgaagcgggcatcccttttgaagttgttccgggcgttacttccgccattgcggggcctgcctacgcaggcattccggtgacgcaccgcgggtactgcacgcagtttaccgtatttacgggccatgaaggcgagaacaagaaggcgtcttccctggatttgaggggaatagccgaagcgcagggcacgaaaatcatgctgatgggaatgcggaaactggcggatgtatgcgaagccctgatcgggtacgggcaggaaccgtctgtgcctgccgccgccgtccagtgggccaccacgggcattcagcgcacggttacgggaactgtgaaaacactgcccgccagggtgcagaaggccgggttgggcgctcccgcagtagttgtcatcggggatgtggtgaaagaacgcgagtccctgaactggtttgaaaaactgcccctgttcggcaagcgcatcgtggtgacgcgcacccgtgcccaggccggggaattgagcgcgcgcctgcgccgcctgggggcggaagtgctggagatgcctgtcatacgcattgccccgccctccaacaggagggaatttgcggaaagcgtggtgcatgcccacacatatgactggctggtgttttccagccccaacggggtggaacgcttcttccaggcgttttttgccgtgtacagggacatccggagcattggaggagccaggattgcggccatcgggccagggacggaggcgaagctccgggaatacgggctggccgtggatgtcatgcctaaaaagtttgtggcggagggcctcgttaaagcgttcagggacgcacgcgaagaaataggaaccattgaacacagcacattcctgtgggtgcgcggagaagaagcgcgccgcgtgatttacgacgggttgaatgcgctgggcgccattgtggacgaatgcatcgcctacaaaacggaagcggaaacggaggatgtggcgggagcccaggcggctttccgcgaacgcggagcggacatcgtgacgttcaccagttcctccacggcggagaactttttcaagctggggcttccgtggccggagggatgcagggccgccagcatcggcccggtaaccacggcaaccctcaaggagctggggcatgccccttcaattacagcgaaaacacacgatatcaacggtctggtggaagccatcgtcaaggccgccggcaaatagggaaaacggcgcggacggcgtgaaacgccgggccgggcagatgggaaatacaaggcggggaacgccgtttaaaagccattgacggcttcccagccgatgaccttcccgtcttcaaacaggacattgcaggagacgggcgggcggctgcccaggggcatcgtgacgcctatcccggtgcctatgccggaatccctgccccggaatcctcctccgcccaggcccagggaccagcccgtgccgctccgcgtgtaaatccaccgttccgtattcttcccgttcatcctgcccgccattttctgttcgggttccccccatgccagcagaaccgccatgggagacattcctttttccagctccccgcgcgccactttggcctgatgctccttcgggagctgttcataagtaagcatattcttcgcaatgcggtcggacggtgcaggggagcaggctgccagcagcacgaggcaggaaggaagaagaacgaaagaaaaaccagttttcatcatcccgtaaatagcacggcggcggatggcaggcaaggtggcagagcggcttttcggaaaaatggagatgagggaatccgttattttgacataaaagcgcgcttttcccgtaaatacataattggttattgacaagcatggggggtaggggagtaggaattcagctccaaatgcaacgccccctttcccgtgcgggcagcgtcgcttttattgttcagcacttttttccgagccgccgatatgtccaaaacgttaattatagcagaaaagccgagcgtcgccactgatttggcgagagtgctcggcaaagagcttggaaaattcacccgggacaagtccggggcattttaccagaatgaccgggccatcatcacctctgccgtaggtcatctgctggaacagaaaaaacccatgacggaagaaggaaagtccctgccgtggaaattcgactatctgcccgtcatccccaggaagtttgaactggaacctatcaagcagtcggaagaccgtttgaaaaaggttcttcagcttgccaggagcaaggacgtcacggaaatcgtcaacgcatgcgatgccgggcgtgaaggggaactgatctttcacaatctggtgcgttacggaaaatggaccaagcctacgcggcgcttatggatgcagtccatgacggatgaggccatcctcaacgcatggcatggcatgcgcagcgaagctgacatgaagcccctgacgaatgccgccgtctgccgttccgaatcagactggctggtggggctgaacagcacccgcgccctgactatcctgcaatcccgcggcggcttcaacgtcacccccgccgggcgcgtgcagacgcccacgctggctattctgacgcagagggaattggaaatccaggcgtttgaaccggagccctattcggaagtatgggccgaattcgacgttcagtccggctcttactccggccgctggattgaccgtgactggaagaaaaacgatcatccccactcccgcgcggagcgcatctgggatccggaacaggcggccgtcatccgcgaccgctgccgcggcaaagccagcacggtgacggaagaaaagaaaccggtcacgacggtcgccccgctgttgtatgacctgacttcccttcagcgggaagccgccaaccgctacggcttttccgccaagcgcacgctgcagctggcccaggaatgctatgaaaagcacaaggtgctcacttatccgcgtacggattcccgctacctgccggaagattatctgggcaaggtttacggcatcgtaggcacggtggcggagcagaacccggaattcgccccctttgccagggacattctggacaacaagcgcatcaagcccaaccggcgcgtgtttgatacaaaaaaggtgagcgaccactttgccatcatcccgaccgggaagatggagaagcttaccggggacgcgcagaaactctttgaaatggtcatggcccgtttcctggccgtcttcttccccgctgccgtgtttgaagacacgcggagaaccacgctcattacccaccaggacggcgtgacggacgctttcctgaccacgggccgggtgcttgtggagccgggctggcaggccgtttacggacggaaggccagcacttcctccaaggaagaactggtgcccgtccgcgacggggagcaggccgccttgcgtgagattgaaatccgcaacgccatgaccaagccgcccgcccggtacaacgaagccacgctgctggccgccatggagggggcaggaaaactggtgcatgacgaagaactggccgccgccatgagcgaacgcggcctgggcactcccgccacccgcgcctccatcattgaagggctgatttcccaggaatacatcgtccgggacggccgcgaacttctggcgacgcgccgcgggattgaactgattgccctgctggaacgcatcggcctgaaaacgctcacctcccccagcctgaccggggaatgggaatacaagctcaagcagatggaacaggccgccctgccgagggattccttcatggagggcattaagaccctgaccggggaaatcgtgaagagggtgaaggatttccgggaagcccagcagcaggtggaactgccggaaatggaattggactgcccttcctgccatgcccacggcctgaaaaacacgctggacgccgtttcctgccgttcctgcaagttcagcatccgcaaagttatctccggccgcgacatgacggatgaagaattgaagacccttattgtggacggcaggacgggaattctccacggatttacctcccggttcggcaagccctttgaggcggggctggaactcaacgacaaattccgggccacgctttacttcccggcgcgggaggaagatgaagccgcaggggtggaggaagccgtgaaagtggcttccgtcgccattccggacatgggagagcatgatgtgatggaaacggccaaggcctggaaaattccttccctgacccttggaaaggaacatgccgccgtctccgtttcccggactatcctgggacgtgaaatcccgctggaccaggtattgaagattttggcggaaggaaaatccgatctgatgaaggggttcatttcgcagcgtaccaagcgcccgtttgacgcttatctggtcttcaatgcaaagacggggaaaataggttttgaattcccgccgcgggaaaggaaatatcccgctaaaaatgctgccggaaaaacggaaggcaaggcggagaagacgggccggaacgccgccaaaactgccgggaaagactccaaatccgggggggctgccaaaaaggggcgcaagcaataacggcagcggaaacattccgccgggaacgaagattgggaaaagagccgggaaaaagcttcttcccggctgttcccgtatgttagcttgaaagcgcacccttggattcctgacgatgaaatgccttttatttgctgtgctggcgtggtgcggcgtggtttgtgcgctggcggaggaatatgcctttccgggggaacgggaatggatttccaaatttggagatgtggtgaagggcagtttccattcctgcacaggggccggggcagttctgaaaatagggcgaaggcatgtggaaattccgttaacccgtctggatgaggaagacgctgcgcttgcggcttctctgacgggagcggaggcgcgccggaacctgaaactggccgcgatgctttggcctttcctgatgaaggaactgcagaaggtgacgtggacgccagcagaaaagaatatctcgccccggtatcatgaaatggcccggaagaagaatgccggagctttaacgggaaccagaaaagtggatggactggtttgtgccacatcgctttccatcattcagggacctccgttccgtatccgggaatacttccgtccgcaggcgcgtccggaaagcggcagggggcagaagaatttcgatgtggttctggagcaggggagccgctgcgcttattatgatatggataagggtgttcttattccctccaaatacctgtctgaggaacggacggaaatgcgcgctcccgtttcctctctgctccctccggcagaacagcttgccgcgagagaatcaaaaaattacaggaatgcggattactccctgcttgtggaaaaccgccccgtcaagggagcctatgaaacgtgcaagcccaattccctgggaagaaaaaagctggtcatgtactggaatacggagggtgaaatggtttgcggcgtcatgaagctggactacgacaacatgcgcgtggccgcattattcgatggacggcggaagctgatgaacgcccctgggcttggatatgccgtgattctttcccggctggataataaaggcagggacttgaaggagaaaggccgttactaccatgtggcgttggctgcagacggcctgcccgtgtattatcatgagggcccggaagatgaggccgccatgaacccgctgctttacgggaaactacgcgattccgagaaaaaggcggctctggcggaggagaaaagacgtgaacaggcattccgggccaggcgggaagcccggcggcgcctggtggaatccgccaggaagcgtaatacctgaaaatagttcctgtcttttcgcgacgggtatccttcttttctggaaagcgttcgtgaatgttcttctcaggagcgctgccctggcgtatttccggattttccagtctttcagaaaggctgattatttattcctgccggggaatttttcagaactatccgaaataattaaaaaacgctgttgttatccgttatctgagagttccacggtgcggaacaaaaccatcacacggattcggctggctctttttccagcggtttgtgatcttctatcaatcttttgatatcttttcttgtttttttatctctcgattttcctagctttctgtaaatatcggtcatgtcaaagtagattaatttttcctgcccctgatcatttctaatagaaataatctgaatatatttgccatcatgcatggtatatatgtaccctagtatgccatatccctcatagtgtttcctgatatattccttctgagattctctgatatcgtctgttttcttgattcctgtaagaataataggattgatgattgaattttccctgtcaattttctgactgccgggaattacatcctccgaaccggcggcattattaatgcaaaaacaggggaagcaggctatcgacaaaaaagcaattttcagtaatggtttcatattagtttatttattaatcagttttatttatttatgttgtcattgcagctagcgcaggtgcagcctgcttcgttgcagttgccgcattgcaaaccgcattcttctgtcaaacgcagccgggccattgcgatgactgtgctttctccttctgcatatgcctcggctttgccctctttttcatcatctgtaccggttactaccggggtaattgtctttcgcagcggtattggcccccctgtctcacccgtgtgatgaacgcttgtatacttacaggatatatagactgtgtaagtgcgtttggcgttggctaccctgactggctctatgtttaaattttttaattcgtattcacattttaattcctttgcattcccataattgcaaataacaaaggtcaaaatgcccaataactgcaatatctttttcatcctaaaattatgggacaattttgatatatgtaaacatatttttaatatgttttacataattattgcttgatagatagttacaaaaatatctaacaaaataatgattatccgggaaagaccccggggaggatgaggcgctgaataggagtgtccggcgttccaacggagaagcaacgccttcgcatctcgggagaagttgaaaatgcccggattggctttaattccgcccgaaggcgcggattttaccgggggcatgccgccatgctgcggcgttcagcaaaggcacagttgagctgcggaccctttatatttatccgccatacgggataaaatgggagattctggtatgccgaggggccgggattccactaaaatgccatgtttctggcatgaggaggctgttttctctggagcctttcagtttgagtttctgctggttttccatgaacatggtgtcggattgttccctcaatgcttccatatggcgggtaagaagctgctggcttcgatggtccgcatctgagcatcctgtgaaagcgcttcatggttttcaagtttctctgttgatgttgagtctcccgcagtctttttcgatccatccggagaggatgggaccggtgaatcggattcaggtcaaataacctgttccggggtggttcaggaggcatcaaaagctttcagcactatttcttattcccggtccgtgttccggattttgatgttgatgaagattgttcccggacgggtgttatttgccgtcttttacggccgtgtacattagccgtatcaatggaggcggctcctgctttccgcgagccggagatgcgctgaattcccagtgttcagccaatgcatattttcagggaaagaagtgattcctgttctttcctgaaacatttcctgccttctttatgccggaagcggcaaaggggcgtgcggcatatgcggcagtattatcttcctgcctggaggcagcggtagtaataatccacgcgggaaatgaaccagctccatttgtacccggggcgcccattagtcatcagcggggcggggcaattcttgccggaccagtagttgtgaggcactacgttgcgcagagggacgttgtagcgcatcatcagcagcgccgccagcttggccgtcttgttgtagatgacgacagggttatgcgtggtgcattcacacatttcaatggctacggagtattggtctcccggtccggaatggtccgcatggtggccggtttccgtagtggggatgtgctggtaggcgccgaattggtccacagtgaagtgccagttcaggctgcgggacttgccgctgttcaggtaacgggagtgggcattggcgtctcctttggggttggcggtgctgtggatggtgatgaagcgggggcgcatggaggatgcgcgcttgcgggcatacgtgtttttgggcatgtaggaaactttaatgcctacttcacggcccatctggccgggtgtgcggggaactaccggcgccttttgaattttaaaagagacggtcggcggcctcattttgtcgttctgcgaacagctgcagaacgtcagggcggcgaatacggcaaaaaagcccgtccagacaaatctatattccatgcgtttgttctaggaacagcctggaaggattgcaagaagaatttggaattagttcggatgaactaatcaggctgtgccgtgaagttacaggtatatccggtgcggatgaggcggacgggccgcgccttcgggaggaaggggcccgtccgtgaggggaagccgtaccgggaacgtccggcacatatcccgttatctgaggatttgggtaaggacatattgcaggatgccgcccgccagatagtattctttttcaataggcgtatcaatgcggacgatgacaggcacgtcaaatgcttccgcatccgcgggctgtacgcgcagggtgacctgctggcgcggagcgatgccgttgttcaggcccaggatggagaaggtggcgtccttcaacggagtgatgcggtcataatccgccttgtcggcaaagttgaggggcaggacgcccatgccgataaggttggagcggtggatacgctcaaaactcttggtgatgacggctttgacgcccagcaaattcgtgcccttggccgcccagtcgcgggaagagcccatgccgtagtcttctccgccgatgacgatgagcggaacgccgtcctgagcgtaggccatggccgcatcatagatgaaggcgggcgttcccgcggcaggggttatttccttgtccggggcgggaacggcgcggttgccgaaatacagcgtgtaaccgccttccgtaccgtctaccatcaggtttttaatgcggacattggcgaaggtgccgcgggtcatcacgcggtcgtttccgcggcgggagccgaaggagttgaaatcttttctgtccactcccatgccctgcaggtacagccctgcgggccctgtttcccggatggctccggcaggggagatgtggtccgtggttacggaatcgccgaaaatgcccagggggcgggcatccgtgatatccgccagtgtgcggggctggccgttgaagccgctgaagaaaggagggtcctgaatgtaggtggattgttcattccactggaagacagagccttccggcgcgtatacggccgcccagcggggattcttgtccggcgtgatggtgtaaagctcccggtatgcttccgggttgcgggatttggcaacggcttccgcaatttccccggagctgggccagatgtccttcagaaatacggggttcccgttgcggtccgtgcccagcggttccgtctggaagtcgatgtccacgcggccggccagcgcaaaggcgacgaccaggggaggggacatcaggaagttggtcttgatggaggcatggatgcgggcttcaaagttgcggttgccggacaggacggaagccgctacaatgtcattgtcccggacggcctgttccagttccggatttaacggcccggagttgccgatgcaggtggtgcagccgtagccgacggtttcaaagcccagagcgtccagggattcctggaggctgttggttgcaaagtaatcggaggcgatacgggaacccggagcaatggacgttttcacgtgcggaggcacgttcagcccccgttcaaccgcttttttggcgagcagcccggcggcaagcatcagccccgggttggacgtgttggtgcaggaggtgatggcggcgatgaggatgctgccgtctttcagcttcgcttcctggctgaagccgtccaccggaacggggacgcccgccggggagtgcatggaaaccgtgacctccggagattccttcttgccgtaacctccttccgccacgggcatgctgacaagcttgcggaagctgtccctgatagagttcaggcgaatgtggtcctgcgggcgtctggggccggagacggctggttccacggcagacaggtccagttccagctggtccgtgtagtctaaatctccgttacggggcattccccacaggttctgtgccttgaagtagttttcgtacgtagtgatggcttcttcgctcctgcctgtctggcgcagatagtcggagcagcgttcatccatggggaagaagcccatggtggcgccgtattccggggccatgtttgctacggtagcccggtctgccagaggcagggccgccgccccgtctccgaagaatcccacaaatttgcctacgacgccgtggctgcgcagcatctgggtgacatgcagcgccaggtccgtggcggtcactccttcgcggagttctcccgtcatatggacgcccactacttccggcaccaggaacgtgacgggctggccgagcatcccggcttccgcctcaatgccgccaacaccccagcccacaacgcctatgccgttaatcatcgtggtatgggaatccgttcccaccagggtatccgggaagtaaacgccatccttttccatcacgccctgcgccaggtattccagattgacctggtggacaatgcccacggacggaggaaccacggaaaaagtctgaaaggcctgctggccccatttgaggaattcgtagcgttccgcattgcgctggaattcaatgtccaggttcttttccagagcatccgtgcatcctgcccagtccacctggacggagtggtccaccaccaggtccacggggaccagaggttcaatgacggaggcgtcttttcccaatcctgctacggcggagcgcatggccgccagatccaccagaagagggacgcctgtcaggtcctgcaggacaatgcgggctaccgtaaacggaatttcataggaaccgggattgttggcattccaggaggccaggttgtccacgtccttttcagtcactttcaggccgtcgcaattgcggagcagggattccagaacgatccggatggaaacgggaaggcggttcaggcggggatagccgttttccgccaaggctggcagtgaataaaactgtcccggggttccggctcccgtgatgaacgtactcttggcaatcttggtcatgatgcggaatagagggttaactgtaaacaggcggctgccctcctggcagtcgcgggtactatacaggccaaatgtgataaggcaaggactctgtgtgacggagggcggattttcccccccttccgaagccggggaaatttttctctgaaccggggctgccgctttttccggcattttttctccatgcacgccgcaggaatcatggagtgcgtcatggaacattgaaaatgagtccgcagtattgtccaaccctgtgaaaggtttcaagatgatgaacgcaaaaaacatcttatcaatcatagcgggagcgttggcgctggctgcctgttctggcccgcaggaagagaatttgcgcatggttcccctgaccgtgcctgcaaccgtacccatgacctcctacggaccgcacgcgagggtggttgtagcaggaattgattatacggaggtgcacgacgaatggatgaatcccgatatcatgaaaaaggccaccccgggcaatacgcgcgtggtgatcagccgcggtcgccagaggggccagttgatggtgggggatgaggtagccatggattttcccgtttgcgtgggtaaggcttcccaccgcacgcccgtgggccatttccgcattacggaaaaggcagtgcatcatgtttccaatttgtatgatgcctccatgccttacttcatgcggctgacggacagcggcattgggatgcacgtaggccctgttttccagacgccgcagtcccatgggtgcatccgcatgacccgctcttcctgcgtgccgcttttcaaaaccgttaaggtaggcacgcccgttacgattgtacagtaatgcccggaaaatttccgggcgcttttccggaagaaaagtttcccgcgtttttaagaaactcatttttttaaacaaaaaaacgccgcccgccgctattttgataaacggcatgtagataaacggtacttgccgcaagtcgcattgcctcagcaacccgaaccctccatgccgctgccgactgtatcgtattcattcatcggcagcggcatggagggaagccgtctgcttgaccgcagaacttggggaatgaacgggctgcccgtatttagtgaagaggacatggttcttgttctcccggggccgcatttgtccctccgtgttgtgaaagattaatggagaagaaggattggcctcccctgctttttctccggattatttttccgcagctttcctgtctgttccttcccggtgcagcaggggaaggtattttccataaccctgtgcttccatgtcctgttcaggaatgaatttcagggaggcactgttgatgcagtagcgcagtccgccctgttccttcgggccgtctgtgaaaacgtggcccaggtgggcgtctcccgttttgctgcggacttccgtgcgcctcatgccgtgggagaaatcctgtttttcctgaatcagttcttctttgatggggcgggagaagctgggccagccgcagcctgaatcaaacttgtccgtggacaggaataaaggttcgcctgtcgtgacgtccacataaatgccgggtctgtcgttattgaaatattcattgcggaagggaggttccgtcgcgttattccgcgtgacggcaaattgctcgcgtgtcaggacgcggcgcagctcttcgtccgattttttccggtaaacaggttcgttttcgcgggcctgggacgcttcccggaatttggcgggtggaatatgacagtatccgccagggtttttatccagatagcgctgatgatatttttccgcccgtgaaaattggcggaggggctgaacttcaattgccagaggctgcctgaagtgctgctggagccttttcagggacgtttctataacaggtttgtccttctcatccgcgtaatagatgcccgtgcggtattgaattcccctgtcgtttccctgtttgttgacggaaacaggatcaataatggagtaataccgttccagaagaaagggcagactgagttcttccgggtcaaatactacttttaccgtttccgcatggcccgttttcccgctgcatacttcttcatacgtgggagaagccgtggagccgttggcatatcccgcttccgtttccttaacgccgggcatcagggagaagtacttttccactccccagaaacagcctcccgccaggtaaatcgtttttaaatccttgttgtccatatgaggtttgtcattactgcttgactggcctttttccccgcaggaaaaaaaggagagcatggcgactgcggccaaaatggcgcatgccagtccggccagtgtccatggtccgtggtaaatacgcttcataaacgctgtatggagtcgccttccggtgcgggagcagcggctccctgggccggggaactgctgtcccccggcttttccggaaaggtaaatgattagacaacagcgggttcattccgttcgatacctgtgtccatatttccttatttctcccgtttttccgtcttcatcctgtttttcagccactggcaaatagcccggtcggaggcatccggttttctgcttgtctgcatgctgaatccgtatttggttcggaagttgaaaacggccagagaagggctcaggccgatggaaagcccctccatccgtatttccacctcttgcgggacatggctggagaagtcgaggcgtccggcattggtgacggtttccacatagtgtttcaggaaaggctggatgctggccaggaaggagggttccagagccatgcggcagcgttccgaggaagaattttccctgacaagaatggcggaaggagctgcgatggcgtgggcgggccttaacgtattcagcggaacattccataaaaaggaaaacagccccgtgcccaggagaaaaagaaggacggccagagcgccaagccatttgacccgtttgtttactgattgatgacagggctggccttcgttcatggagagaagcatggcataatattccatggtgatccatgaaagaatttgccaggaagcagatgggaattcccgtccccgcatgagggaatttttgtactataacatgaaaagcatgaaaaaaaacgctggaaatcatgtatagtatcattaaatattaatgtagtgtatgagaaaagattccatttttctttccatttttttatttttcctttttctgacaatctccgtaaataaatccctcgcggaaaaatatccttcgctggatgttccggaagacattttgctccacgtgaaagaagctgcttcctctcagtccccctattccggcaatcattccgtaaagcaggctgtggacggctctatggaatccgccaactggcatgttcccggagtgcatcgtgtggagggggaatttgtgtttgaagtgccggagaccattcattacatcattttttccggagccaatttcaatgaaattgccgtgtccgccatgtccggctcgtcttggaaggaccttggaaaattcgatatcggcggctccaggatgatcagatttaaaaagcctcttcaaaaggttcggaaaatcaggttgacggttgattatcccgaaggttcctctccgtcttttaccgtacgggaaatcagcttttacaaaagggtggagtccgcacttaaccggaaattgctgaaagtatttaaggacacgagctgctcctccatcaatcccaggtgtaccctgacggacctcaaggctcttccggagtttttacagatgattgcgaagaaaataaaatccggcgattatgaagacaaagaattccgcattgcttcctataaggcttacagccatccggagtttgctgcgaaggtgagaaatatcaatgccctgaacaaatttgacaatcctaccggaattgtcgcggagaaaggagatgaaattcttgtgttcgtaggacctacccatggagaagatattgggctggcctccgtttctccagcgggaatagagtcttcctcctatcctttgaacgaaggggtaaacaaaattagaatcaaccgttcgggattgctttacgtgatgtatcacaccgatatcagcacgcccaagaagccgataacggtgcatattcctgtgggaagcggcatagtgaatggatattttgacgtgacgaggcacacggataaggactggaagcgtatgatcagcaacgccccgcatagcatgttcgatatcgttgggcggaattccatgatgattcttcacacaaagtacctgaaagattacagtccggattccattacgaaatccgtcagggtatgggatgaaagcgtcaaggccatgtggaaaatcatgggatttgacaagtatccccagccgcacaataaccggcagcttggcgtttccgtagaaggaggagcccatatgtttgcaacctggtattactgcggctacagtattggagatcagggaaatacgctgaaaaatgaagtgctcgcgcctggagttcttcagggaaaccgcctttggggaatcgggcatgaaatcggtcattgctaccagcatccgttcaactggcgcagcatgtcggaaagttccaacaatttttttgcccagctgattctggaccaggtgaccaatgccattaatggcaatgagcaggcctccgatatggaaaacccgtgcaaatacctgctttcagaagcggtaaagggcatgccgttccatgatttgaacggctgggccaaatggggttttgctcaatattccttctatctgtatttccataagctgggaatcaatcccgaattttatcctaggctgtttgaatcattgcggcgcaagccgctttccaggcaggcgtatgaggtttccgaagcccatttggccttgtatgaacgcatttgcaatatcagcaggacggactttaccgatgactttgaaatttttaattggtttgtcccgattgaccgcaaggggcatcaatatggggattacagttttaaaatgacagaggaaatggcccgggcatccaaggcccgcattgccgccaaacggtaccccaaaccgaaattccgcattgccttcctgcatcagcatggaaagacggtcaatttgtgggggcagaatctgcatgggtcccagctcaacggctattggaccaaatacaagcagaacgcaaaactcagcccgtctgtaagcgcctccaaaaaggataacatgattattgtgcggaatggggaaaatgcagccgctttctgtgtagtgaccaatggaaaggtggtaggttattatgaccgtcagaagtttgacgtttccggcgtggaatggaatgatacctctaaagtgtacgccatcccgattcagacggcggaaccttataagttgatttatgctgccgggcgttcctgaccgtgttttggaggtttgggaaaagcctcccggaaaatcatattccgggaggggcgggtattgggacgcctgctattcgggtgccttgaagttatatacgggcctgatgcgttccacgatttccgccgtttcatggatgttgtccagcacgctctcgccatccttgtaggccattggcgcttcatccagcgtagcgcgggaaacgcaggtggagaaaataccctgcatggaagcctcgaattcctccagggaaagattggctttagcctttttgcgggacatgctgcggcctgcgccgtgcggagatgaggaattgaattcttcatttcctttgccgatgcagatgacggagccgtcacgcatattcaggggaacgatgagtttttctccgcgtccggcccggacggctcccttgcggatgatttggtcttccgcaatgtagttgtgcacggtgtcgaaactttccagatcagctgcatcatccagcagttcatgcagtatcacgcggcggttcagggctgcgaagcgctgagccaccttcatatcccgcatgtagttcagcgtattttctccctgaaggtagcagagtcctttcttgcgttctttaagataggcgtccggacaagtatccacggcgattttctggtagcgttccgcaatcttcagaccgaaattgcgggaaccggagtggatgcacaggaaagcgtgctctttcccttgcgctatttcaatgaagtggttgcctcctcccagagaccctacggagcggcggtgcctgtctttgtccgttctcagcacgtccatgcagatgcgggagatttcttcatccagttccgggtcgtccagcaaggcttgatgaacggagggacgggcatgcatcccggacgggacgctttcgcgcaggcgtgcgtcaaagctggaaaaatccggcagtccggacagtctggcggtaagcactccgcagccgatatccacgccgatcaggttgggaattaccttatccgttttcaattccgccgtgaacccgatgacgcagccggctccggcgtgcacgtccggcatgatgcgcacccggcttccttcaaaggcggggtggttgcagacgtccctgatctgggtgcgggccaggtcttccagttcatccgtgaacacgcgggcttccgtgtattttccgtcaatggtgatcatggttttattcttttggttgaggggcgcggagatatgcggaaagcgccttcgcgccctgtgaccttgtcaccataacgcatttgttgactcttgcattatataagtattcatattatataactataaagttatgtttgagcatcttttcgcagaacggggactgtccctggaccgattgaaaaccttgatagaagtggccaaggctgggagcattgccgctgccgcccggggggatagtgcgcggcagagcctgtattcccggcagattaaggaattggaggaattcttcggtgtggaactggcgagccgccgcgggaaagtgctggctcttaccggagccgggtgggagctggtgaggctggccagtgaaagcctgtgcctgctggatgattttaaaagccggagccggaatctgccctaccggttcactatcggagccggggacagcctgcatgcttgggtggtggctcccgtgctggcgagtatccagaaacgggggctgccgtggcttttcgcgctggagaacctccgcaacagtgagattccctctaagctccagaatatggatatagacttcggcattgtgcgtaccagcgcgctggatgcggaagggttggaaagccgggtcatttgctccatggattatgcgctgtacgttcctgcagccctggccgggaaaaaggcgcgggggaagaaggaggattttctccgcctgctggaaatgttccccctggcaacgctggggagcggttccgggtttcatgcgttgctgaaaaggaattgcgctgagttcggcatcaggctgcgggtgcagtgtgaaacgcaatcttttccttttgcggcccgcatgttgaagagcggagcgttcatggcaatcctgccctgcatggcggaaaaagaactgggggaaggatttgtcaaggttactcatccggcgctggacgggctgtcccgcagtatttccctggcctggaatccgcggttgttgcgcgtgaggccttcagccaaacgggtaattgatgttttttccatcccggaacgggagtgatggaaggaaaatcaatcagaatccacgcccaatttatttttacggtagtggtccagggagatgcggtaaaaatatacgatcgccagcaaattcagcagggctcccgttccgaaggcccagttcaggttcaggtacgcgtaaattttgcctcccaggaacatgcctgttcccaccccgatgtcaaaagcggtgaaaaatgtggaattgacggctccccggtggccgcggtccgccatgttcagtttcatggtttggaacgtggggatgaaaatgccgaagccaaagccgatgaggatggcggaagcgtaatagatccattccagcggcgccagcgccagcgcgccgaaactgacggtcaggatgctcagggagatgacggaaagctccgccacgcgtccgcggtcgatttgcctgcctaccatgaacctggagaccagcatgcccagccccatcagcgcgtaaaacagcccggcgtatttgaacccgtgcatttccccgtacagggcggaatacacggccaccacgccataagagaaggtggcgatcatcacgttcaccgccagcggaatgcccacgcgcagcacaagacggtccagtacctttttaggcgtttcatacacgggctcctgaacagggctcctgggaacgcggatgagagatgcaatgcccgctccggccaggcacaggagcagggagctccaggtaatcacgtaaaagccgtactgctggtatacctgaaggccgatgacggggcccaggcacatgcccagcgtcattgtcatgccgaagaagcccaggccttccccgcggcgggcaggggggatgatatccaccgccattgtcgggccggaggtggtcatgcctccccagatcaggccctgtatgaagcgcgtcaggaaaaacgccagggcggtggcggccgcagcataccctgaaaaggacagggccagcataatgtaaaccgtgatgtaaatcttcttgcggtctccggtatccacccggtgcgcgaaccaggggcgggagataatggcggccagaacataaatggacatgatccagcccagccagccagaggagacctgcaattgtcctgtcaggtacagtgggaggacgggcaccagttcatagaaggccagccccgtcattaagttggcgcaacaggccaggatgtagtctcgcgtccagagaggcgctttgacggatggtgcggtttccgccgccaattcatctcttgtccgagtcatgcaggggttgtacagccgttgggaaaagtttcaaacggcctgacgtgtcatgatgatgagcgaggggaagaaggccctgatgaatccttgttgggagaagttattcattttcacgggaaaaggttacgcccaccagcgtatctctcccgtcaatggcattcagataatcgaatacttctccgcagggtgtttcattctcaatgaagaaaatgaatgctctgcgctggttgatatgttcatttgccatattggcgaaaacctgaaggtcgtttttccgggatggaccggatggttttttctggatacgccagtaaacaagctggtagttccctctttccgggtaaggggaccggatgaatttcacgatgggataaacgggtttccgggaaggtgttttgttgaaaacaagaaagtcatcttcacggaaaggatgttccagaacggcatcgtcgggaaggcagggaatgtccgggttcatgtctttttcagattctggatcagattccggggccatatccgtggagacgggaagatcccagcaaattccattttcaaaggcggacgcgatggcatcccctcttttcaaacggagattattcacgccatgcgcataagcttccgatatgccctcagcgatgcggaaccagggaagggacggattgtccagattgatggtcaggcatctttcacaggccgaatccgtcttccattcctgtatggggccgggcagttccgatgcgttcacgattatttctccgggcagcaaggcgctttcctttttagagcatgccccgaagaggaagctgatgaagagagggaggaaaacggcaggaagacgaagaagaagcatttattcattcttcttatatagtttttattgcatgtcaaaagaatagagagtgcggtacatgccgggaaagatggcgctgtctcccgctccggaatatgccttcttttttgcgtgcaggacggcgcgggcatggtagggtacatggtatgagtgtaatcaccaagcgtggagacagcggagaaacggacctgatgttcggcaggcgtagtcccaagacagcgccgcgcattgaagcttacggaacggtggatgaattaaattccctgattggcgtggtgcgtcattccggggtaagctcccggacggtggagatgctggacggcgtccaggctcgcctggtgggtgctatgggggaactggccacgatggaggaggatttgcccaaatatgacgccaaggggtacgcccgcattaaggcggaggatgtggcatggctggaggaacaggcccatttgctggaaaaggaatgcgacatccgtttcaaaggctgggcccgcccgggcaaggaaggatcgctgggctccgcgtatttggacctggcccgttccgtctgccgccgtgcggaacgccgtgtggtggcattgaagctggatcatgccctgagcaacgtgaacacggccctgttcctgaaccgcctttccgatctctgctgggtgctggcccgttttgaggcgctggccgcaggggaaaagacccaggcctgagcaggccgtttccgcccgtcctcctgttccggcatgttgcgtatctgcgcgattcccgtgtcgggagaatctcgtgaaagaatggttttgccgcagatccatgtccgggtggcaattccccggaatagttctccgttgtttcctggggacggctttccggttagtccagcggcaggatggaagtaaccagcattttgaatcgttcccgggcaatgacggaatgaggtactccggcgggaatcaggaggctctttccttggggcagattaacttcttcattgcctacggtgaagtaggccgtcccgtccagaatctgtatcagcgcaggaccgggcgtctggtgggtaggaaggagttgctcgctgtcaaaggccagaatggtcatgttgactcctttggagcgtacaagggccagactggtgatttgcccttcgcggtaatcagtcaggtcggcgtaattaaagggagtgcgttcggggatgtgctgaatggctgtcatgtaaattggacacccttgttggcccttcccgtttcttcatgacaggcttccgggaaaaaggtccgctccagacccgggagcggaccttggcattcagcattcatatggtgcttacttacggagtcagcgtcctgaattcataggcgtgaggtcggattcacaagtaaacaacggtcattctatacatgaaaaatacaatttacttcaagaaaaattgtgtaggaaaatgcagatttgattctgttgcagggagaatcggatttgacttccggatgggattgtttccatatacgggcgtattgccgtcagcggttccgccgcccgcggccggatatgcccttctcctgtttggcggggaaggccgtttttcccgtttgccgcggtttctcccgtgagacgatggcgaaatccgcccactgctgctccctgtccactttcacgggaatgacgggaacgcgcagccctgcgcacagcacggaaccgtggtcgtttttccagcggctggcaaacgcctcatacacccagcggccgccgggaagcttgtccggtttgaccagccccttaatctggagacgcgggatttccagcaaaacgccgaagtggcgcgtttccgtaaccagagcttcgtgcacttccggatgatccgcgtagcactggccttccagccattcgaagagcttcatccggttcgcgtccttttccgcgctggcggaaatgcgttccgtttctgaaatgtgttccgcgtcttcctccagcctacctgtactgcctgctcctttagctcctttgggagggctggccagcaggggattcagggagcggtgtaccaccagatccgcgtaacggcggatggggctggtgaagtggcagtaattgggggtggccaggccgtagtggcccaggggctccgtgtcgtacctggccctcatcaagcttttcaggagcgccagcttaagcaattgctcgtccggggaacccttgatggatttcatcagttcattcaggtactggcgttggccgatatcgtgcacgggatgcccgtacagtctgcacaattggccgaattcaaaaagtttggcggaatccggttcttcgtggacacggtagatggtgggacggttcccgtttttcagggccagggccacggcttcgttggcggccagcatgcactcttcaatgagctgatggctttcatcgtactcttccgtgatgatgcccgtcacgcggccgtccttgtccataacggctctcacttccgggaagtccagatccagggctcctttggcgtagcggttgcggcgcagaatggaggccagattccaggcttcccgcaccgtggagggaacttcccctttgtcgtttcctttcagcatggcgaaggcctcctggtaggtcaggcgcgccttgctgcggatgaaagcgtcagcaaagcgggcacggagcatcttcccctttttatcaaatttcatttcgcatacttttgtcaggcgcacgacatccggtcgcaggctgcataaatcgtcggaaaggcggggcgggagcatcggaagaacgcggtccggcaggtaggtggagttaccgcggcgcagggcttccccatccagcgagccgccgggcttgacaaaatgggagacgtccgcaatatgaacggccagcgtccagccggacggagtggccgtgatggaaatggcgtcgtcaaaatccctggcgcttgccgggtcaatggtgatgacggtacggtccgtccagtcttcccggcgggcgagttccccgggggaaggggtttgaggcagcgtttccagctcccggagcacggaggcggggaattccacggaaaggccatattttctgataacggcttccatgtccacgtggggctcgtccggatagccgagcacctccacgattttcccgcgcggggctttcttttcctcaccgcaggttacgggctccacggaaaccagttggccgggaagcacctccatggcgggtttttccgccagttcaatggatgacggagagcttacgccgtcccccagcacgcggcccggcttgttctttccggtgcggaagacgccaagccagcgggaacgcgcgcgttccgtcacttcctccacgcgggctttcatgtcggcatccggggaagaaaagcgattcctgcggatattcctccgtcccctggctgccttgcgttccacgcgcacggccactcggtccccgtccagggcggtgcccagatggttgggtttaagttccagttccggaacggcttccgtgtcccatcccagagccgcagcggcgggatccccttttctggggagaaaaagaatcttgccggagcgcaggatgcggatcatgccatgcaccaggttccggcgctcccgttttaaagcgtacctgcccttttgcagacgcacgagttttccttcctcctccatctggtccaccagggcgcggaaatccagcttctgccgggaatccacgttcagggcgcgggccagttcggatttgctctggggttcgtaatgtccgtcttccatgtgacggatcaggcggtctttaaggaaattattcattttacggaagttccgggaaaaggagtttcccattcccatggatgccatcataagaaggttttcgctccgcttcaaggcgcgggcggtgcatgccgcgttcgtcagcggcttttggcctgctggcgcacctgccgtttttacggactttatccgcaagacgggctttaatttttcagcgtataacgtatttggggtgaaaaacccatgctgtttatgaggaaggggctgccgttggtttcttaaacctgtggctggagaaataaaaaatgtcaaatggaattccaaaatgaagaacaaaaccaacaaggcttttcaacggacgttgctggctttgaccggcaaggaaaaaactttcattaaaatgatgagaagctgccgacggtttctcatcatgtggaatgatgggaaatatatgatgcaggcccatgaatttgtgcaggaccgtttaagagacattaccagcgacgcggtgaaaaagggggtggccggcatggagagagaaatgggtatccttttaaagagtgataaaatattgaaaatgtatgatcaaaaccccggaatttgaatggagattgaccattgttcaggtggagattatcccggccggagcgtgccctccgtggtgccgagctgttctgcgacgtccaattcccggataagccgggccgcagtgcaggaaccgtccagcagctcccggtagcgggacaccagaaggcgtactttttccgggggatcatccagcagttccagccggaaacgggaaaggcccagacggcggaagtcctgaaggaagcctgcacctgtctgggcgcgtccgttgaacagcgtgttccggcacccggcgtccgccagcaggggatgaagttgtcctacgcggtcacgcagctgcacatgatgccgttcgcaggggcggccgcagttcttataactggtgccgttcgacaggaaggtgcagaacacgcaatgctccatatgaaacatgggcatgtgctggtgcagcgtcagttcaaaccattccggcggcgcggcgcggagcaggtccgccacctgttccgcgttcaggtcgtaagagatggtgagatgggccagattcccccgtttcttcaggatagccgcgctgtacggattggcgacgttcagggaaaaatctccgatgcggtgcaggggggactggcggaaatattgcgccgcacccaggttgcgaatgagaatgccgtcaggttccgcccgttccataagtttgaagtatccgacttccgagggtttctggatgcggggcgtcgccaggaagacgggaatgctttttccgtgttcccggacggtttttatgccttccgcatagtcccggaggtcttcaaagtccagataaacggcatttgctccggcatccagcgcggcgggtatttgctccgttttgcggcacagaacagacaaatggggaggcatgtccggaacggctgttcccttcggcagcggaggaagggtgaaggaggccggaggatgagagggaacggaggattcttttgccttccgggccgtttgaattcgttccaccagggcacgccttgtctggttgaggatgctgagcggaagcatcaggccctccggcagccggcagtcgcaggaggccaggcggaatcccgttccccccagcctgccgagctgttgtttcagcacttcgggagtcagagggcgtttttctgccgtctgaaggggctggggagattgcacggaacatccgtattccggacaggcaatcgtcaggggtttcccgacggacccggcacatgtcagacggaggggaatggtggattcctgcaagtgttcccgcatttttttcaactccgcgttcagggccggatcatccgttttccagagtttttgcccaggtttaaccctgctccagtcaatacgggatgcctttccgtggaagaaaaggcggtttctctgcactttccagatacgtccgccctgttcttcattgcggtcttcccctgcatcaatgacgaagccgtccccgggcgcgagcggaatgcccccttccggcctgatatccagccagccctgaccgctgttcataatgacgcctgcgtaggcgcccctctttttaccgtagcggccgtgggtcagacgcgggtggttcgtcccgtccagccagccggtggagaagccgcgtgaaaataccatttgcagtgcataacggtcgcgtgcggtcaccatttcatccacaggtattccagcgcaggcggcgtccagagcttttctataggccgccgttaccgccgcaacgtattccgggcttttcagacgtccctctatcttgtagcttttcacgcccatgcggaccaggtccgggatgcggtcaagggcgcacaggtcctgcgggctgagcaggtagcgccgttctcccagaggaacggttttgccgtctacaaccagggaatagggcaggcggcaggcctgcgcgcattctcccctgttggcgctgcgctgtcccaagctttccgatgtaaggcactggccggaataggccacgcagagcgctccgtgtacaaatacttccaggggaatgtccgtatgccgtacacattgcccgatttccttcaggctcagttcccgggccaggacggcctgcttcaggtccaggaatccggaggcgaattccagcccgtccggggaggaaagtgtcatctgggtggaggcgtgcagttccagcttcatgccgggaacctgccttccccattccgtcaggcagcgggcaagcccgatgtcctgcacgatgaccccgtccgcgctggcggcattcaggtggcccaggtaggagagggcgtccgccagttcggaggtaaaaatgagcgtattcatggtcacgtaccccttcacgccgtgtgcgtgaaggaaacgcatcagttccggaagggaatccagcgtgaagttgtctgcgcgcagacgggcgttgaaacggtccaggccgaaataaatggcgtctgcgccattggctacggcggcgcgggcgcagtccatgtccccggcgggggccagcagttcggggcgcaggtctccgggccggagggcggaaagggttatgtcgtcggaagtcacggagaaaagcaaaaaggacggtaggggttattgggcggtgctgcgtttttccgcatggcgaagcagagctttcaaatctcccagaaggaacagggagcctgccgccaggaccgggagcggggaggccagtgccgcctgcagcccatccagaagcgaggaatggatgaaaacggggccggtttcctgctcgcccagcagggcagccatttcttccgccggcatgatgcggggggaagtgcagggaaccagatgccattctccggtaatttcccgcaaaaccggaatcatttcccggatgtgcttgtctgcggatgcggcaaaaaccagtgccgccttccgtcccgggaattcctctttccacgtggacgcgagcacgcgcgccgcatgttcgttatgagcgccgtccaacaccaggggaggcgtctcaaggcgttcgaaccgtccgggccactgtaccctgtccaggactgcggcggcttcggatggggaggggagggaatggagccgcctcatggtttccagcgccagggctgcgttttcccgctgatgggctcctggcagggatgggatgggcgttttccggtccgcccgggcaatcgtgaggggagaacggcggttttgcgccgtccgttcgatgacggccatgacacccgggtgctgcacggcagttacggacggttttccgggggcgatgatggccgctttttccgcagcgatctcttccagggtatctcccagatactgctggtggtccaggccgatgggggccagtacggcgatatccttgggcacggcgttagtggcgtccagccttccgcccagccctgtttccagaatgatgaagttcacgctgtttttccggaagtggcgcagggcgacggccagagccagctcaaaaaaggtgggcggctgttcccagccttccgccagctgtttcaggaaggaaatctcctctgccagggcgtccggagtgatcatgtccccattgacgcggatgcgttcagaaaaatctaccagatggggggaagtgaacaggcccgtgacataaccctgcgccctggccagggcctcaatcatggcgcaggtggagcctttcccattggtgctagccacgtggaccacggtggagtttatccggtccgccccggctgccgccagcagcttcctggtattatcaagccccagcttgatcccgaaaaattgggtggaaaagagccagtcaagggcggcggatacattcatgggcggtattttaccacgggaaaactcccgttcaactccggtatggcgtggggactgtaaaatgccgccgggaacggacgcggcaaacacgaacaagctaccgttgctacctctcggtcctggcggggtttgccagtcgtgcctccacggggttcccggcggctcacccagtaaactaggtttgcagtgcagtgtcaaccttcaaagacatcatctccttctggcgaaagagagcagaatggagatcagcaatattacgccgataacgactgccgccgtgaagaaaatttcttcttcctgtctgagctagctgcgctcctcttcgattttcgcgtctctgacgcgttgcagcccgtgcagggctttggcctgttcctccacatccgcctccgttcgcatgacaatcgtttcctcatggctgacggcctggtcgtaaggagcaatcatcgtgcggaattcggggtcttccgaaagtatttccgtctcatcataatcttccgccagaggggagttcatggtgtcccgaagactggcgatctgcctgtccacattgttttggaacaggcccaactcccttttggccttttcgtaagcttccgtctggtcgcgcagagcggcttccccctggccggtaatacgctccagttcctgcggaagactggcctgaagtttgagcagttccgtcctgttctccgtcactttaaaattcctgcttttcgtgttggacgcctccgcgagctggatgcggttgatgtccagacgggtttccacctggcgtatttgttcctgaagccggtttcgggcgctgtccaattgttgtctggtggcgtccctcctgcttttgagttcttccacttccgcaacgcgccggtcatattgttccagcagatgggctattcgggcttccgcgcttcgggcattgggctttccgcttacgggagagggcgtctttttcccgtctttttcctggcaagcttgctttattcgggcatcccagtatttgcggacggcttcttccttccgttgaatagctttctggagacgcgccgcctgctgttcgtgaagttccgcggcttcatcaaaacgggcttgggccgcatccagctccgggcagggttcctgctccatggttttgagggcttcaagcctgggtgcgaggccgttttgataataatcccagccgtagtatcccccggcgagcaacaggatgagaagtaggtaacgcatcagtgaaaaaaggtagagtcagaagtaaatctcatagtgggagttccgccggattttgcaaactctaaaatcagccatccggagcttttcccctcagcagggagaatgatgataaattcactccggagggggcgtagttttccttgaagccatactttcaagccatgtctattttctcatcacgcagacaatttctcaaatctttggggcttgcggccggagcggctgccgccggaaatgccctccccgggaaggctgtggaaatccctgccggagaccatctctggaaatccgcctctccggcggctccgaggccttccggttccacatacatgggagggttcaaggctccccggctgggtcgcatcaggctggccttcatcggcgtgggagggcgcgggttctcccacctggcgcaaatgtgcgtgatggatggagtggaaatcgtgggcatatgtgatttgaaggaagagttgacgaaacgcggcgtggattgcgtgctctccagaatggggaaaagccctttgggctattccggcggcgatatggaatacctgaccatgctgaaggagctgaagccggatgccgtcatcatcagtacggattggagttcgcatgccagaatcgcctgcgacagcatgaagcacggcgctcacgcctttgtggaagttcctctggccgtctctctggaggagctctggagcctggtggataccagcgaggccaccaggaaacattgcatgatgatggaaaacgtcaactatgggcgggatgaactcatgttcctgaacatggtccggcagggcgtcatcggcgatttgcttcacggggaggccgcgtatatccattgcctggtgacgcagctgggggacacgcgcggggaaggggcctggcggccggaatatcataccagaatcaatggcaacctgtaccccacccacgggttggggccggtggctcaatatatgaatttggagcgtggagaggaccgtttctgccgtgtggcggcgttcgcttctcctgctctcgggcgcaatgcctacgctaaaaagcatcttcccgccgatcaccgctggaacaatactccattcatctgcggtgacatgaatacggctgttgtcaagacgcagctggggcggaccattcttgtccagctggatgagacgtccccccggccttactcccgcgccaacctgatccagggaacggagggcacgctggccggtttcccaacccgcgtggcgggtgaaaagttgggcaacggcaattatcatgaatggattgaaggcagggaaaaactggccgctatttatgaaaaatacgatcatcccctctggaaacgcatcggggagctggccacgaaaatgggcggtcacggcggtatggactttgtgatgctttcccgcatcgtggaatgcctccggaacggagagccaatggatcagaacgtttacgaaggagcttcctggtcttccctgctgccgttgacagcccgttccatcgcccagggcgggatgcccgtggaatttccggattttacccgcggagactggaaaaccaccatgccgctggccgtggtttcatgaataacgtcggggatgaaggggcgctgtcctcttccggagagttcaggaaaaaatctgttcttacgcagggtgctcagcaaggactgccggaaaacagattgtttaattcttccgcgctcatgttcatgagccattgttcggggcctccggagaacaggtcgtccgccatgcggcgcttgtccttgagcatggcgtcaatgcggtcctcaatggtgccccggcagatcaggcggtgcacgagtacgttccggtgctgcccgatgcggtaggcccggtccgtggcctggttttctacagcggggttccaccagcggtccacatggatgacgtgggatgcctgggtcagcgtcaggccggtgccggcggctttcagggacaggatgcagaagggagggccggattccttctggaaggcggtgacgatgttctggcgttccggaataggcgttcccccgtgcagggtaagcccggaacggccgaagactccggacaggagatcgtgcagatggggaatgatggagcggaactgggtaaagagaattgttttttcctgcctggcggcaatggaggcgcacagttcctgaagccgccggaactttccggagcgttccggcgcataatcgtccgtgccctggaactgggcggggtggttgcagatctgcttgaggcgtgccagaatgggtaaaatcagcatcaggcgggcagccgggtccggttcgtccagtacggcatgcagaatgtctatctgtgtctggtacagggcggcctgttccggcgtgagggagcaataggccggtatttccgttttgtccggcaggtcgggaaccagcgccgggtccgttttcattctgcgcaggatgaaggggcgcaccaggcgtcgcagcggggcataaccgcgttccagggaacgggtgaaggattcgaagcgttttctgctgcccagcagccccggattcagaaattccatcaggctccagagttcattcaggttattttccaccggcgtgccggacagggctatgcgtcgttccccatgcagggaacggatggcgcgggaacgggcggagcctgcgtttttaatagcctgggcttcatccagaataatggccgggaaatgcaggtcggccagggcggacgtgcgtgcagtcatgccatacgtagtgatgacggcgtggcagtctttccggcgcagggtattttccggctgccacgggtccggggaggaagggtgcatgatgcgcaggataagctccggagcgaagcgttgcgcttcctctttccagttggacaggagggaggccggagccacaatcagagcaagcaggacctccagccggccttttctccgcaatgcgtccagccacgcaatagcctgaagggtttttcccagccccatatcatccgccaggcaggcgccgaaaccccgttccgtaatccggtaaaggaaagagaacccttctttctggtaagggcgcatcagggcgtccagccgggaaggaagctccggtatggagactgggactttccccaccaggatgtccagggtctgccggaggttttgacccggttccatgacacagtcttcgtccggttccggaatctgtacaagctggccggaagggccgttaaccagcattctcagaccctggaccagagggatgccgagggagctcatcatacgtgctgcttgattccaccggtccattaagtcccggacctttcgggcgtccacacgcacccattcccccttgaagcggatcaggccgtctccgttgctgagcaattcccccagctcctccggggtcaggtctttgcctcccagagtggcggatacggaaaatttcagcagactgcggacggaaagcccggaagaatgaaccgttttttcacttccggatgcgtctgccgtaacttttacctgtagtttgggagggggttttttccataggttcaccatgcgcacaatgatgcctgcgcgttcgtagagcggcgtgtcctgcagaaaatcccgggcctccggagcgctccaggccatcggcgtataaatttttccgttatccagcaggcgcttcagcaggggactttcctgtgccgcttcttttaagggctggagtacggccagcagggcggtgtaattcccttcatgaagtttcagggcggtggcaagggggaggtggcgcacctggttgtccgcagcgctttgatgcgcaaaggtagccatgaaagcaaaggggcgggagcctgtggcgtcatcccggttttccgcaaggtggaaaaataccttgcctatctggttccagggcgcgcccaggccgttcaaccattcggcgggggtaatgcctcgggcgcggatttcctttgctattgccttccgcaaatcttcaaaccatccggcaatgatgtccggagtggcatattccgcgcccggtacggggggaaattgctccgccagaaaggctttttccgtagcggaggccagcaggtggtccagaacggcatctacctcgtccggcctttctgcggcagcgtgcgccatgcgggtaagcgcctggcgcgccatgttcttgataaagaaggcgcccggatccgaaacggtttcccagttggataccgccagggcatacagcccgtttccggttccttcttcaaacagacggtcgaaaggcggcgtgtccgtcaccaaagcaccggaggggaggatgcggaaaccattgatattccgtttctcttccggtactgcatgatagggatccggctgcatggctggcgggaatgtagcgtgtgcttgcagccgtagttcacagggcgaacgtcgtatctttgatgataggtagcttggacggcggaggattgagcagctccttgatttgtttcaggtaatcaatcagggctttgcggacatctattcccgtcggtttgccgttcccccgttggggaaatatgaaattgctgcacaggtagtctcccatcgcgacagtgtaaatgaccccgtttttcaaggtgctggtaatgctgggcgtaacaccgtccatgatctggtaggagaatccggagcagtacacttccagaacgcctccttcgtcatcggtcggagacatgaatttggacaggatcagttgttcaatgtccgctttactcatggagcaggtgacgatcttttcccggaagggttccagctcgtaaatgtccctgatggtaacgggtcctttgttaagatggtttttggaccgtactccgccgcggttgtaaatggcaatatccgaatgggaggcctgctgaatggccttgcagaaaagggtgcctatggtgacgtgcgtgatttcttctccggcgacgcccacttgctggttgaaaagcggatttccggaaaatcggcggacaatttcctttacttccgggtcatcgggaatttcctcattcaaagaaacggccctggttgatttggaaaggatggagacgggatgttccgtggagaaaataatttccgtaacgcctacatggctcaggctgtgtcccgtgtggctgagcagggttccggttctgagatgaccgctgggcagcatgacatgggtatggcctccaagaatgacgtcgatattcggagaatacttcatcattttcagatcattgccgtatcccagatggctgaggatgacgttgatggtattatggtggagccggaacctgtccgtgattcccttgtagtcttcttcatccggcagcttccatgagatgccggtcatcctcctcacatccgtggtttgaaggtctgccagtcctatgacccctacggaaatggacgttcctttaatcggaatgctgacatacggagaaaaacagttttccagagtaggggaaaggctggcgttggtaatgacaaacttggtggagggcattcccttgatatggtcgcgcagggcctcctgcccgtaatccagatcatggtttccgatggtcactacatcataccccagcttgttcatcaggatagtaaggggttcgcctcgtttttcacagtcgtccacatagggattgcctatgaaataatcacctgaatccaccagcagcacgtgcggatatttagcgcggtattgctttaccagtgtggccagtcttgggaaattgtccagattgccgtggatatcgctggtagaaatgataatcagcgttttatcgggatccgatttaggctcctgagccagagagaacgggtacaggcatgccagggaggcaagaacaatgcggagcggaatcatgcagggtaaaatgataaatatacggaaaaggatgagatgggattaacgggcggaaacctcatgcgggccgtcacccacggagatgacttccagacggaccctggatacgccgcgtctatgcaggccgatgcggcttgcggcggcggtggtgaggtctatcaggcggttgctgtgaaaaggcccgcggttgttgatcctgacgacggttgatttgccggtttccaggcaagtgactttcaccttgcacggcatcggcagggttttgtgggccgccgtcatggaacgctggggattgatgtattctccggaagatgtcttcaggcggcgcgctttgccgccataccaggaggcatagccggtctcatggtattgcagggcatccgccacgctcatgggagtatacctttttccacgcacccggtagggcgcatttttgacatgcgcctctgcctcctgaacggatggctccgttttctgagcgcacttctccgtagtggagcagcccggcatcagaaaaagcaacaggacggggaggaaccatttcacgctttttacgtttaacacatattgatggttttgtataacaaaaaaggaacaagagttgaaatttaaggaatagagcagggcggaacaatcttttcccggttgcggtttaccagttgagcggcccggaaaaatgcagtatgatctcccgcatgaatctttccaaggtaatcggcctggtcgctctggcggaaaaaccgggactgggggaagcgctgcgcatcatgcgccgggaactttcccaccacgggctgggctcctgcgtcattgaaacgccggatgctctggaacgggctatcggacggtgcggcatgctggtgaccttcggaggggacggtaccatgctgaccgtctcttccctggcggccatgcaccgcgttcccctggcgggagtgaacctgggttggctggggttcatgaccacctgttccgtgcaggaactgccgcttctggcgtatgcccttcaggaaggttcctacctgacggatgaacgttccatgcttgaagtggtccgggtggggggagacggcgttgcggcacctccgcgcaagctggccttgaatgaagtttccctgatccgcgcccagtccggcaagatggtggacctggatgcggagatagacggagaattgctgaaccgctaccatgcggacggcgttctggtttccacccccaccggctccacggcatactccctttccgccggggggcctctggtctggcccatgtcccgtgtcgtatgcgtcacccccatctgcccgcacagcctgaccaatcgttccgtggtgcttcctgacaacatgaccatacgcctgcggccccgcgagcgccgcggccgctttgactccatggtctattccctggacggccgttccgcctatcccatcgaagtgggagaaagcctggtaatccggaaggcgccggaaacgctttccctggttcatctccggaagcagaatttcggcgccctgctgagggccaagctgcggtggcagggggcggaaatcccctcggacgatgaataggccgttgcggaagcccagtcccccggaggactgtcccctcactacggaattcctgcatccgggaacggtttcccatttatcgttccgcattggcgcaggggcggtaaaacgattttttttaggatgcgggcttgacgaaaaggcctatcctataatactcttcctgccctgccaccaagggggtggtagatcttaatcgcataaacgcgtaagaaatagtcatatatgaagacccacgtgaaaaaaggtgatgaagtggaaatcatcgccggacgtaaccacaagggcaagcgcggcaccgttctcgccgtgaatgcttccaaaggtactgtcatcgtagaaggcgtccgcaccctgaaaaaggctgtgcgcccgaccgaacagaacccggaaggtggcattcaggaaatcaacggcccgattcacatctccaacgtgaaaaaagtaggctaggccatccggtctgaccctgcgcttaagccatatcaatcattaataaagagctgacccgctaaaacaatgagtacaccaacactgcaaacatactaccgtgaaaaggtcgttcccggccttcaagcgaagcatgcatacaagaacgtgcatcagattccccgcctggagaagattgttgtcacctcctgcatgggcaagcacccggaccgcaagcaggccgtggaagatgccgttaatgaaatcgccaaaatcaccggacaaaagccctccgtcacctatgcccgcaagagcgtggccaacttcaaggtgcgtgaaggcgaacctctgggagcccgcgtaacgctgcgcggagcccgcatgtgggaattcctggaccgcttcatcaatattacggctccgaacattcgcgacttccgcggtcttccctacaagtcctttgacggcaacggaaactatgccgtcggcatctccgaccagtccatcttccccgaaatcgaacttgaccagatcaagcgtcagattggcttcgatatcattttcgtaacttccgctcctacggacgatgaaggccgcgacctgcttcgcgctctgggcgtccccatgcgcgaaccgaagaaggccgaagaaacccaaaccgccaacgcctaactatttcttaccatggccgtattaagtgatcccatttccgacttcctcacccgcctgaaaaacgccagcctggcaagcaacgaggaatttaccgctccctgctccaacatcaaggtggaaatcgcccggattctgcaggaagaaggctacatctggaactatgaagtgaccggagaaggctccaagaagcaaatcaaggtgaagatcaagtttaccccgcagggcaagccggtcgttaccgatgtgaagcgcagctccaagccgggccgccgccagtacgtttcttccgaggacattccccgcgttctcagcgggcttggcattgccatcgtctccacctcccgcggtgtgatgaccggtgcgcaggcgcgcaaacagagcatcggcggcgaacttctcgcccttgtatggtaaccattaacatttcctaaacatatgtcccgagttggtaaaaaatccatcacattgccggacaaggtaacggtaaaggttaacggctcttccgttcaggtggaaggccccaaaggcaagctttcctggacgcttccggaaggcatcaccgctaccgttgaaggcaatcagctctctgttgaccgcgccggcgaaagccgccagcttcgcgccctgcacggtacgaaccgttccctgttgaacaacatggtcatcggtgtttccgaaggcttcgtcaagaaccttgaaatcgtcggcgtcggtttccgtgccgccgtcaagggcaacattctggatctgaacctgggcaagtcccatccgatcaaccaggtaatcccggaaggcctcaaggtaaccgtgactgaaaacacgaaagtgacggtcgaaggcatcgacaagcaggtcgtaggccagtttgccgctgaagtccgtgcgtactatcccccggaaccctacaagggcaagggtgtgcgtttcgtcggtgaagttatccgccgcaaggaaggcaagagcgtcggtaagtaattcaggtaataactattacaacatatttatacacgatgagtactatcaatcgcaaagccatccgcgccaaggttcgccgccgcatccgtagaaaggtttccggaacggcttcccgtccccgcctggctgtctatttctccaaccgccacgtctatgcccagatcatcgacgatacggtgggcaggactatctgctccgcttccacggccgatgcttccatcgccgatccttccaaactcgccaactgcgctaccgctaccaaggtgggcaatctgatcggcgaacgcgcgaaggccgccaatgtcactgaagtcgttttcgaccgcggtggattcaagttctgtggcaaggtgaaggccctggccgatgccgcccgcgaaactggtttgaaattctaattgaaagattccttaaatgaataacgaaacggaaaacactgctcctgctacggaagccgccgctcccgctcaagcgcagcaacccgcaacgggcggccgcggaccccgcggaccccgccgtgacggccagaatggccgcggtccccgtggaccccgccgtgacggacgccgtggccctcaggctgaagctcccgtggaagaaggcccccagctcgctgaaaaggttgtgttcatcaaccgttgcgccaaggtcgtcaagggcggccgccgcttctccttctccgccctcgtcgtgagcggagacatggaaggccgcgtaggcttcggcttcggcaaggctaatgaagtggcagacgccatccgcaaggctacggaagccgccaagcgccagcttcgcccggtctccatcgccaacggcacgattccgcatgaagtctactccgaattcggcggcggcaaggtgctcctgaagcccgcctcccccggtaccggcctgattgccggcaacaccatccgcgccgtgctggaagcagcgggcgtgcgtgacattgttgccaaatccctcggttcctccaaccacgccaacgtggtgaaggctaccctgcaggctctcgcttccctgcgcacgagcgaccaggttcttgccgaccgcggcaagaagaaggaaaaggccatctaatctgatccggaggcggcagccaggcgccgccgcctccaagaaatccaaccattgtaaataacatgttacagcttcatacgattaagcccaatcccggagccaagcaccgcaagaagcgcctcggcaacggggaaagctccggtctcggcaagacctgcggcaaaggcaacaaaggccagaaggcccgttccggcggcacgatccggccgggttttgaaggcggccagatgccccttcaccgccgtctgcccaagaaggggttcaacaacacccgcttccaggataaaatccttatcgtcaatctctcccagcttgaacgcgtgtttgaagccggtgctacggttgatgaaaacaccctgcgtgcggccaagctcgtccaaggtccttgcgatgccgtgaagcttcttggcaacggcaccctgaccaagaacctgaacgtagtcgtggacttcgtgagcgccagcgcccgcgagaaggtgacccaggccggtggcaccgtcaccgtgcttagcgaagcctaatcacatttggcgaaccgggtcatgcagcttgacccggttcgcatcattgtgtttactgttgcggttcccatggatgccccgggtgcaaaccgccgcgacatgcaagccaagctgcgcgccaacttttatattacaggaccatgatatccgcatttgcaaactccatgaaagtaccggagctcaggcgccggattttgttcacactggcgatgattgtcgtcgtccgcctgggggtacagattcccctgccgggcattgacgtcatggagctgcagaaagtaattgaagcctccgcgaacgccagcggtcccggagcgggtctggctaccgtgctgaccattttctccggcggcggcctccagcagtgcggcatttttgctctgggcatcatgccctacatttccgcttccatcatgacccagctcctttctgcggtggtcccccagtgggccaagatggtgcgggaagaaggcggccgccagaaaatgaccaagtggacgcgcgccattgccatcgtcattgcccttgtgcagggctggttcctggtcggcacgctggaacacccggaacgcctgcaggccgtgggtctcaacattcctgcggactgccagcttgtcattgaccccggcatccagttcgccctcatgacggtgctcattatggtggcgggcaccatgttcctgatgtggataggcgaccagattacggaacgcggcgtcggcaacggcgtttccctcatcatttccgtcaacattattcacgcccttccgggtgcagtcaccctggcctggaaaaccttggtgtacaaggacggcgcggttgtccccatgggagccatgctgctcgtggccctgattgccttcctgattgtcgtggtggcgctcgtcgtgacggtgacgcaggcccagcggcgcattcccgtgcagtacgccaaacgggtcatgggcaataaaatgttcaacggtgccacgcagtacctgcctctcaagcttaactactccggcgtgatgcccgtcattttcgctacggccatcctctcccttccgcaggttctcttctcccagatcgcccactacaacactacgctgcagtggatcgcggccaagatgaatgactggctgaatcccgcttcttccgggtattacattatttccggcctcatgattttcttcttctcctacttctgggtggcgaccatgttccagccctcccagatcgcggaagacctgaagcgcaacggcggctatattcccggcatccgtcccggcccccccaccgccctcttcctggaccagaccatgcaaaggttgacctttgccgggtccgcattcctgaccctcatttacttcctgccttccctgctgaatatcgggggcaatatcccctacctggttacccagttcttcggaggcaccagccttctcattctggtgggcgtactgcttgacatgatgcgccaggtggaaacgacccttctttcccgcaattacgacggcttcctgaaaaaaggcaagctcaagggcaaatacgggcacatccaaggtaccggcgccgccgcgggcagccgcaccgttaccgtcatgtggattgttatcgccctgcttgtgctggccggagccatcgcctacaacgctatgcagtaagcccccttttttactgaaagtaaagatatgaaggaactcaagcatttcattctggttggggctcccgcatccggcaaagggacccagggccggtttttggctgatatcttcggcctccactccctgagcaccggctccctgttgcggagggaagtggaatcctgcacggaactgggccggaaagccttgagctatatggacagggccatgctggttccggacgaaattgtcaacgacatggtgcgcggctggctgtcggagatggacgatggcgcgtggctgctggacggctatccccgcacggttgcgcaggcggaagcgctggaccattttctaaaccagcggggaacctccgtggatgtagtcgtctggatggatgtgtccagggaactcattgaacagcgcatcatgcgccgccgggaatgttccacatgcggttacgtggtgcagacgccggaagaggaatgttccaagtgcggagggaaaatggtttcccgcaaggatgacaacatggaagctttcgcccgtcgctggaaggattttgaagccatgacgctgcccgtagccaggtactacgaggctcgcggcctggtcgttaaaatgacggtgtccgaagaacgggaacctgccgatgtttcccgggatctggcccgcaagctggaagagtaccggcaatagaaagaataatcccatggcagaacgaatccacatcaagtctcccggcgaggtagccaagatgcagaaagccggggctgtaacggcggaaatcttgatggagatcggggccgaagtccaggtgggacgcaccacgcgggaaatagatgatatcgcgcgtgaaatttttaaaaagcacaaggtaggcaattccttttaccggtaccgcgggtttcccggccagctctgcatttccatcaatgaagaggtggtgcacggcagcggcggcccccgccgcatccagaacggggacattgtgagcctggacgtgggcgccattgtggacggctggcatggagacaacgccatgaccgttccggtgggcatggtggatccggaaaaactgcggctgctggccgtgacggaggaatccctgttccgcgccattgaactggtaaggccgggcgccttgctggcggacgtctgcgcggcggtggagggcttcgtgcgtccccgcggttttactgtggttcgggattttgtggggcatggcataggccgccacctgcatgaagaaccccagattcccaattaccgcccccattacaagcttccgcgcctgaaaaaggggatggccctggccattgagccgatggtgaatgcgggcaggccttccgttaaaattctggatgacggctggacggtcgtcacggcggacggcaagccttccgcccactttgagcacacggttatcgtaacggacggcgcgcccctgattgtgacggaccgcccccgcatcgcgttgccggagcagctcggcattgctcctttgtaacttcagcctctccagggaatgacgccgccggaagcctccgttcccgtgattctggagaagaccgccgcccgccggatggtgtgggtggatgtggcccgcgtggccgcctgcatcctgattattgcgaatcacatggctttctattcggcggagttgtaccggtggatatgggcggagttcctggcggcgcgcacgcccttttttctgctggcggcgggctattttgtggggagagggtcgtttggccctctggatggcgggagccttttcctctggcggcggagctggtttcttcttcgtccgtacctggtgtggggactggctgcggccgttctgatcggctggtcccccctgcacgaatattacgcgtcttaccggcctatgtatgaatggctgggaggggaaaagggagccgggttctggcctgctctcgcggcgttcggccgctgcctgggcattgccgggcatccggtggacgctcccatgtggtttctgcgcgatatcatcatctataccgctgcggccccccttctttaccgtttgggggactatctgctctgggcgggcatggtcatgctgtccctgaactattttgcgctggatctggcggatcatgattatcccatcgccaacagcctgggatttttcctgctgggaatgtatgtttcccggtattccctcccgttcctgacggaatccgtgcgccggtacgcggtgcccttcctggtcgccacgcttgcgcttacctggtggctggcaggccaccgggaccagcacaactccatgctcatcgccctgggcatgctggggctgatgtccctggccattctgttcacggaatggtttccgcgcgctgccaggtgggtggcggagctggctccggcatgttttttcattttcggaacgcattacatcgtcatcatcctgctgcgtgaaagcggctggattacatggaagggggcggcctgggacatgctctggctctttctggttccggtcattttcgccgtgctggcggggctttttttctgcatgaaaagatttgccccgcggctggttcccctgctgggggcctatgggaaataaccgtcttgaagagccgttccgccgggacgggaagggagccgcgcttatctcttgccgtcaaaaggcaaattctttattctttcctttgctggaaggggcggaagcggcttttttgtcacgttgccgttcttgctccacggccgggaaacaatacatggtatggcaatgattcaaggcgagcaggttcaggattcggaattatcaactcaggcggtgatctatctgggcccgagctccatgagcctgatggtggctgaggctgtccgggacaggattcgcctgctggatttccttcagcagcccgttccgatggcgcgtgacattttccggttccaccgcatttcccggcataccatggaccgctgcgtgcaaatcatcggcgactatctggaaattctcaaggaatacggagccggcagcaagctttccgtccggttcatgatttccaacatcatttccgaggcggataatgtggacgtgttcgtgaaccgcatgcacgtggcccacggcttgcgggggcgccgcattgacgacggcaagatgacgcgcctcatttacgtgaaggtgcaggaggctctggcccagtatccggggttcagcaagaaaaaagtgcttgtggtccatacgggaccgggcaatacccgcgtgcttctgttccagaaggggcgcatcgtgcgttattcctgctacaggctgggaacgcaccgcacgggggaggccgtcggggaaatcgagtacggagacgatgtggcggagctttccattctgcgggagcacatgcgcgggcaggtggaccagatttgcctggattacgggggcgtgaagggcctggcgggccttatcgtcatcggccaggaaatgcagcagctccgggaccgcctggcccccacgccggaaggcaaggtggcgtgttcctccctggcggcggaggcggagcggatgtcccgcaccactctggaacagcgcatgaatgtttacggtgcggattttgccggggtggactccctgctgcccgccgttttgatgacggaaatgattgcccgcagcctgaacctggatgacgtcatcattcccgcgagcggttatgacgaggagttttcaagcagcctgatacgtgcggaacagcatccgggggatctggaggcggaggttctccatttcgccgggattctggcggacaggtacaaggcggacaaagggcaccgcgagcatgtggcgcgcctgtgcatggaaatgtttgaccagcttcaggacctgcaccgcctttccgaacatgaccggctgctgctggaagtggcctccattctgcatgaggttgggtcttttatcaaccagcagaaccaccagctccattctcagtatatcattctcaacagtgaaatcttcggcctttcccgggatgatgtggaaacgatcgccctgctggcccgctaccaccggcatgaggttcccgccaattccgatcccatgtacggggagctggaattgagggaccgcatgcgcgtagccaagatggccgccatcctgcgcgtggcggacgccctggaacgcggccatgcccagcgcgtgaacggcgtccgggcgcacatccgcgggcgcatgctggagctggagcttcagggcgtgcgtgaaaccgccgtggaagacctggccctgcggctgaagggcgacctgtttgcggatatcttcggttatgacgtcgtgctggtgccccagcggtaggctgattaaaaaaatttccattttccatttttcccatgtctgacgaatatatcaacagagaactttcctggctggaattcaaccagcgtgtgctggaccaggccgtaagaacggatcttccccttctggaacgcctgaagtttctggctattaccgcctccaacctggatgagtttttcatggtgcgcgtgggcggccttcagatgctgcggcattccggttcccgcgtgaaggatatttccgggctgacgcccacccgccagctgaaagccatccgctcccgcgtgggccgcatgattgaggaccaataccgtctgttccatgaagaaaattctgccgtggatggaaatcaacggcatcaatcccctggcgatggaggatctcagcacttcccagaaactgacgctggagcagtatttcaacaaccagatattcccgcttctgacgccgctggacatggatgctccggaagctcccgcgctgccatccctcaagctgctgatgggcgtggaactgcgcgacaatgagaccggggaagtgcgctccgccgtggtggcccttccggacggcctgccgcggcgcgttcccgtcccttccgcggaggcggagcgctacgtgatgctggaggacctggtccgggagtgcatcggcaccgtttttcccggtgagaccgttctttccgcagcggtgttccgcgtcacgcgcaatggggacattgccgtgcaggaggaagacgccctggacctggcggatgagatggaggaagtgctcgtagcccggaaattttccgaatgcgtgaggctggaagtagagtcctccgcgcccgcccccctgcatgacaagatcatgcggattgtaggcgccgggaaggaggagacttatgacctcaagggtcccctgatgctttccgacttcatggaaatggcttttgcccccggcaatgaccagttgaaggtggagcagtggtccccgcagccgtccccttccgtgaatccggctgtcagcatttttgaaaacattgcaagcggggacattctgctcaatcatccctatgaaagttttgaacccgtcctgcgcctggtggaggaggcagcggaagatccggacgtcatcgccatcaagcaggtgctgtaccgtaccgccaggaactcccgcatcgtggccgccctgaaaaaagcggcggagagcggcaagcaggtgacagcgctggtggagctgaaagcccgttttgacgaagcccgcaatctggaaaaggcggaggagcttcagcgttccggcgtgcaggttgtttacggcgtcaaggggttgaagacccatgccaagatttgcctggtggtccgccgggaacagggcatgctgcggcgttactgccatttcggcacggggaactacaatgagaccactgccaagatttacacggatatttcctaccttacctgcgacgaccagctgggagcggacgcttcccagttcttcaattccgtgacggggcgcaccaagctcatgcgcttccgaaagctgtatccctccccagtgttgatgaaggcgcgccttattgaacttattgaaggggaagcggagcgagcgcggcagggggaacccgcccgcatttccgccaagatgaacagcctccaggacgtggaaatcattgacgccctgtacagggccgcggacgccggggtggacattgaactgaacgtgcgcggcatttgctgcctgaaaacgggcccccggcccaacggtaaggtaatccgcgtggtcagtatcgtggacaggtatctggagcacgcgcgcattttctttttccaccacggcggcaaccaccagcttttcatcgccagtgcggactggatgacccggaatctggataaaagggtggagcttatggtgcccgtcaccaacgggaagctggcgcgccgcctgaaatccattctggacgcctgcttcagggacaatgtccaggcctgcaatattctgccggacggcacttccgaacatgtcgtccggaaaaagggtcagaaagccttccgtttgcagcagtacctgaccaaggaggcgcgccgcctggccaaggacaaggaacgggaacgtcagcagatgctggaaccgcacacgccgcattaaaggcgctcgtcacgggcgtttgaaggtcctccgggaacagcctccggagtacgccggttttccggccgtctgcggaggctgcccatgtttcccggagaggggggaagccggttacggttttctgccgtcaagaatggacagcaattttttcagccacctgattttgtcccggcgtttccggaaaatatggccccgggagaagaacagtttccattgctggccgcggatatggcgctggaggagcggggccagcccctgggaaatcgcatccagttcctcccggaacgcgggaagcctctttgcttccggccaccagaaaaaggagtacaggatccagtggaactgccccatggttccgggggtgtcaggaagccgccatggtttttccgggcctaccatgtgcagcagtttccatgaacgcccgcaggatatggacggaacgttttcaaattcggttccgcgcaggagccgtgttttttcttcatcccaggtccaggacaggaattggaagttccattccggaggcagcgtcgtcatgtctccgtgcagggcgatatttaagatgtcctggtccggataggggaagggttccgggcggcttcggagctgttggagcagccggtgttccaggttgcggcggcgcatctggtccagatccagcaccaggacgccggaattgcagtaggaaaggggggaggaaaggtagttgcccatatattccagatggggatgcatcgttcctttttcaatgctccagagggccaggccgtctccggccgccgctacggaagctccccgcaaatcggaaaaatacagttcggctacgtctccggccagcaggacatctgcgtccagataaacgatcctgccgtactgcgggaacaggctgccgaccatcaggcgggcatacgcaaggggggagtagcggtccttgttgccgttttgaaagagatggcggaattcttccggaagttgcaggaaagaaagggaaacctgcggaaagggggcggcaacctggttcagctcctgtattattcgcgcgtccattccgtcgtgaacgatatgaatgtcataaaagcgtccggaactggcgtgaaggcaaagggtgtgaatggctacgcccaggggcaggccccagccgccggtggcggaaaacatgacggggatgcgtgatttctccggggatgcgggaacgggcggggttgtcatggaatcggggaatttcatgggaagggtcttgaagaaggggctgcgggaaggaataggccggggagggaaagagcatggaggctccgttcaggccggaaaagggatgtctgttatttgaagaagggggcgtctgaagtctttaaatgccggggccgggatttttgcggggggtaaccgtttttccccgcatggaaaataatttggcggttttcgttcatttgtccgtttcatggttcggggcggcttttcgggcattcctgttcctttggcggttcctgccgggcggagagaaggggcaggagcagtccggctgttttccctgcctggtacgcgcggtccggaggggagaaatggaagggatctatatatctgcgcccctgcatgaagtcatggtggtctgaaagaaccgcgccgggcagggaagatgccgcctcacggacaatggaattaaaggcggtgatgattttctctttttcttcattcagcgtgccgtccggcccatccatgatggacgtactggttgccaggatgaggaaacggcagcgcttgctgagctgggagacgaatgccatgtaatttttgcggaagtcatccacggaaatggcggagaccttattggtgacgtgggaaccgaaggaaacaatgacggcttcgtatccggcggagggaaaatatcctgcaagggtggggagatagtccggatctccgggaatcagcgtggaggagaacaaatcaatgtcttcctgaagttctgaggcaaggggccgccacaaatgccgcatgacggaaccgccaatgagcagtatgcgcgcctgccctttttctgaatgaatggccgtaatccagtcggtttcctcacggtaatggggaggggccgccaatgtcctccagcgggcaagcatgcgttccttccggcgttttcttcttttctccagcaggcggtgtattttcccggaacgccttctcacccacgtttggccgaaaggcagccggtggaggacctgttttcccagattccggtaagcttccgggaaatcttcttccccggagtcgggcagggggcggtattgcagcatatcgccgcaaaagtcaatgaatggaaggttcagcttgcctgccagcgtgcgaagaagggcgttccaggcttcaaggacacccggttcttccgcgtaggggtgccgggcgctgccgtagtcggagggcggggatgacaggaggatcaggcggcgcgtctgtttccgcagaaaggcgaaaagcctgcaaagcatatcttcggcgctttccatgggcccgcccccttccgggggcttttccatgagcctgccgttggccggggaaagatgcaggggcggccacatgaaaagaatgatgctgtagcgggcgccggaaaggctgtgctccatttgccgccacaggcggggatggttgagcgggaaattgaagatgagcgtgtcggcggccagtcgggacgatttcagatggccatggttttttgccagagcggaactgccgatcaccagcattctgtcattgccgggcaggaggtggtcgtgttgctggtaggaatagatgaacacgggaaaaacagcagttacagggatgatcgggggaacttctttgcagaataaagagtgtatccgaggatttggagcgtgtctattccgtttttggaaaacctcagccggaacattttccttctggcggtcttgaacttccagaagcattgaaggaggcgcaggtaaatccaccgtccggccagggcggcctcaagataagccctctgttccctgggcatcccgcaaacgtgttcggaagtgatgtccgcctcccgccagagttccgcccaatgcctgagccgcccggccggcatttcattgtccggaaaaagcagggggacaatataattcatgtaggccgtgcggttgctgcccagaaccccttcccggagtttttccctggtgagcatctcgaatacggcgtaataacttgcgggccgggtttccgctttccggttgcgagaagaaacggattggggaccgcccagcccgtagtggtagagtttttcagaggtgagggcgacgctgcggcagcgggcgatggcccgggaaacgtaaagggtgtcttctccgctggtgaaggaagaaggcaggcggacttccaggggggcggaacagccggggagtatccgcctgaacaatttgctccagacgacgccggtgatcctgtcttccagaaagagcctgaatatttctcctttctccgtaaagacgccgtcgcaggcggtgttttcaatatgaaggagtttttcctcagccattccgcgcgattctccgctttcagccggaaggaagggggaataggaacattggaccatgtccgccccgctttcttccgcgagccggtagagccgttcgtacatgtccggctcaacgtagtcatccggatccgcaaaacccaggtaaggcgccgcggctgccctgattcccgcgttacgggcttccgccctgccggaattttcctgtgtaatcaggcggaaacgactgtctccggaagcatatttccggacgatgcctccggacccgtcggttgaaccgtcgtccacgcagatgatttccaggtcgcggagggtttgtgccgccaggctgtccagacagcgcggcagaagggactccaggttgtagatggggacgatgacggaaatgaggggagaggggggcatggtctgctgtataggaaacggggttatatccggagccatgagccggggatgagtgcgtcatccgtatggtaccggtcgccttcctccctgttgaaccagatgcgcggcgcgatgacgattttctccgcgtgttcgttgagccaggccgcccaccaggagaaagtgctgttggcgatgatgtggtggcggcagtttcgcatcagttccagatcgaagtagccggtgccgccgtcattgatatccacatggacatggggcagggcgggcctcaggttttgccgggcccattctatgtcgtccgagaagatgaagtaacgcagggattcctgcggagcgcctgccgcccgcagccttccttccatttcagccatactccggaggtagtattccagaggcggcggagaaaggtaggggttggaaaggtaatccgttctgcggatgtgcagggaaatggagcagcatgaacggatatcttcaagaatgcgggcgttttccggagtcaggggagttttcagacggaattccctgcaaagctgttcccggcagtggaggaagtattgttccgtctgaaaatatcccttgaaataggtatggcggcggggaggagctgcgagaccgggatcgaacccgtgccgtttttcctcccggaaatgaggatatttgggagcggcgaacagggaacgcaggcaggcgggaatacgggacttgcggaaagcccaggggggagggcctccttcaatgggaagggaaacccggaagtgatggagttcgcagaccctcttatcatcatgttcatatgatgaggtttccagtcttgcttttcccccttgccgggagagcgcgaagaggaaggcgtattggaacagctggtttcccagccctccgaaaagacgcatgactattatttttccttttgccatgttcaagcaggggaaggggttaaaacgtgatattcctgcgtatttcctccagctgttcgcgtacttgccgcagccgtgccctgccatttctcctccatgaggggacagggcagaaatggaggagcttccggcggattccggtgtttttgccggccctccggagccttcttccgaagtctgaaaagccggaggatttcaacaacaggcggaaaggaagatgcagggaggccctccggcattcggcggccgtgcaatgggcgttcaggaagtcccggatgatgctgtaaagtatttcctgctccggcggggagaaaggcatgccaagcagcctcagttcaaatggttcatgctcaataaagcggacgagatggcaagcttttcttttccagagatggcgttgttcataaaactcttcaatcagggaaagccaccgggggatcatgggcaggatgtcggcggttcttttccgtatctggtggtggttgccctgttcatgctggcggtaatggtaaacggcctccggacagaaggaaattttttctgtcagcgcgagcacgaaatgcgagaagaggccgtcttcacaggggtgaatgccttccgggaattccagattgtttttcaaggggaactcccggcgcagaaatatgccgcaggtgggcagggcggggattttgtccggcggaaacctgtcgcagaacagctttcccgctacggtcaaatcgcttgctccgcggtccgaggcgtccagaagatgtttgagaaaggccgcgtcgatgaaatcgtcaccgtcaacaaaacacaaatagcgcccggaagcgtgccgcatgcccagattgcgggcggaggaaacgcccctgttttcctgttcgaagcagcggattcttgagtcctcctctgaaaagcgccgggcgatttcccctgacgagtcggaggacccgtcgttgacgatgatgcattcccactccgcaagggtttgcaagcggatgctgctgatgcactcttcaagatattgttcctgattgtaaacgggaacgatgacggaaacctggggctgtggcgggcgggttcgggtcatgggcgggcctgttgaggttcggagggggagcatgcggcaagggcccgctccagattggaacgggattccctgtcaatatccctgcccagttggagaagcgcctgctgcatttctgcgtattcctcttccgtctgcctgatggcgcggagcatggcgccgccaagcgtttcttccctgtaaaggagtgcgttcctgtcgttgaagccgtagaaggaagcgaatttctcatggataaccgggattttcgcgaatccgtaaacaagctgggcggaaccggtgacgccggtggtaatgtagcggttatgcgccggattgccgggatcaagcaggggcaggaaatagtccgcccgcctcatggcctcgtacatggcggggaagtcgagctttccggccacatgcaggaaggggcgcagatggccggggatttttcccagctctccttcccccacgatgatgacggaaaagttcctgtacccttcattgcagacggtttccagcgcctcaaccaggagttcgtggtttttccgctgtgcggagagggaacctacggtgatgaacacgggttcgcggttccggggcgcaggcgggatttccccgaaaaagtgcggattaaccatcatgcccctgggaaaggagcccagcgtcagcagccgtccctggcggtcaagttcttcttccccgaaccgggggatgtcctttaattcatgttcgacggccagaagattggcgaatttgtcaagccccgtcatatgaaggaaacttgcccagcccggaatgtcataaaaggcggatgttgatatcaggatggcttcgtaccgggtgaggacgcgcgctttggccaggcgcttccatgaagtgcacatggccgtgaaaatatggatatcgccttccttgaaacaacacaggggcgattgcctggccaggctgtgatgcatcaggacatcaacgcagtatcccatgtcgagcaggtggcggcagaaaccggggatgacttccccgtggcaatagttgggttccagaataaggatggtgcgaccggccactggatgcctgcgccatgcgcgcatgcttcggcgggcgtcccggtcatagtcggacagaaaatcgcgcaggaaagtgcgccattttttacgcaggttccgaaacggaatacacatggtcagcaatcggagcatgactgtctgcgtatgtgtcattggtttcatggtgaaaaattgcaggaaatataatgaatatcgcctgacgcggatgatgaatggcccttgttaccgttccgggcggtttttcgcctgccgggtaaaaaagaatacgttgtgtgacgagggctgaatacttaataaattcatactgaaaagcaatatcaaaaaactccttggcgcatgatgccggagtattcctgacggtttgaattttccgccgtattgcagccgtaccacagccctccgtttccgttattcccgggaacttccttcgggaggcagcctttacatttctttccggaaacagtttccctcttccggttgttccgtttttcaacagatggcgttgctgttttttcttgatgtgaattttcaatccggataaaaaaggatgcttccgccatgagcgtatccgtttctatcattgttccctgttataatgttgccgcttatttggaccagtgtatggaaagcctggccggccagagcatggaagatatcgaaatcatttgcgtcaatgacggttcttccgaccgtacggcggagatattgcgcgaatggcgggacagggacggccgcgtccgggtgattgaccggaaaaacagcggtgtttccgcggcgaggaacagcggcatggaagcggctgcgggaaagtatatcggttttgtggacccggacgacgtggtggagcggaatatgttccggcgcctgtttgatgcggccgtggaaaaagatgcggacgtagcggtgtgcggataccatgagttctgcgactgcggaggcatggatatgcctgaaagcggctggtcgccgtcagccgggtttttcccggaagaaaaagcggagcggttccggcgggggacgccctggagccggtgcgcgggaacggtgtggaataagctgatccgcaggaagctgctggaagaaaacggtgtgcgtttcgttcccggattgcgccagggggaggatttgtatttctgtttgatgctgttgactgttgctccgcggctcctgatccttcccgaccgtttgtaccattaccggagggaacgccccggttccgcctcctgcgggcgggatccccgcctgggggatttccgcatggatttgatgggcatggaatctctggcgcgtttctggggggagcgggggctgcttgattcacccgccgccttcggtctggtggactactgcatggagttgatgcgcaggcatttcatcatgaaagagggagcttttttcaaagcgtctccggaagaccgggaagttctgctttccggctggaaaaagtggctggagctggtgggcgcggagaacgtccttcccagtctggaccggtgggaccgggctttttgccgccttctgctggattgccccctccggagcaattttttctctgccctgcattcccgcctgatgtcgtcccgcaaggggcgccggggggcttactataccctgaaaaggcacctggtgaagtgaaaagggggagattccccccctttccctgctgttccggcgccgcatggggttgcggaaaggcggaatgcctgccggcatcctacaggcccgtgtagcacatctgctctttgagctgggccacctggaggtcttcccccagatattccccgatggagtagccgaagagcatggcggcgccggggccgttggcggtgagcatgttgccgtccagcaccacattttcatctttcacaatatgggcgctagcttcgttgagttcccggtaaacgtcctgggccgggtaggccgtgacgttcctgtccctgaccaggcccgctttggccagcacgatgggggcggcgcagatggcggccaccagcttgcccgcttcatgcatttttttgaccagatggatgacttccggcgtgtcgcggagtacccaggagcccgcgccgccgggcaggatcagggcgtccagcttgtcagcatggagtttatccagcatggtgtccgtgctgacggttacttcatgggtgctgaccaccttgtcggactggacgccggcaagcactacgtccatgttcaggcgccgcaggatgtccagcggagccatgagttcgatttcttcaaatccgggggcggcaagtatggcgacttttttcatggttggtaagacagggggaggaagaggaacgttcaaggaaaaaagcagcatgttccggtagccctacaggaggagaagaaccgggttttccagcagggttttgaattcggcagcaatgttggaagccttgcattccggcagaatgccgacgttcacgtacagggtgacgggcaggatgagtttggacacggggcgccccgcttcaatgcccgttttcggcgtggtgcctcctatgctgatgatgctgtggggcatttccggcagcacggcgcgctgggctgccacgttcacgccgctgtcgcaaagaaggatgttgggcgcgacgctgcccgcggggagcgggcctgccgcaggggcggccaggcgttccatggcgatgttgtaaatcgtcttgccggaggcgttttcaatgaagacgtatttttcccccttgtccagcaccatgagcagttccgcggcggcgtctccggccagccattccggctcgctggcgcatgctttcaccgccgcgcgcaccacgtagtcaaagaggctgtagcggccgccgatgagtttttcgcactggacggcgatgggcgtgctgatggcggccaggtaagccatgttcgcctccagggaatacaggtaaaaattgtctacgcgcgtggcgtggcgcgtgtcccggggcgccagcggggtctgcacccggcgggcggggccgtctgcggggcgcagggcggcccgtacatccgcggccatgattttgccccgggggccggtgccgcgcagcgtggcggggttcaggccggcttccgccgccagcctggcggccagcgggctgcatattgcggacgggcgcggggggcagccgcagacggctgcgccgaattccggctgaagcagcgcaatgggcgctcccgccgcggcggaacctccctccggcaccaggatttccgtcagggtgccgtcctcgcaggcctggagctccacatgggccttgtccgtctcaatatcggccagatggtcgccgacttttacaaagtcccctgtttttttgaaccatctcaggacggtgccttcgtgcatggagtcggacaggcggggcatttcaatggtaatagccatggaggtgaatgttgaaatatggtaaaaaggaggaaggcgcgccggaaggggcgggacgtctccttccggcgcgcggaaacgcggttacgcgctgtatttttccacgccgtcgatgaataccttgcaggtattgaagtcatcgtccagcagaaccatgtccgccgtgaagccgggggcgattttgcccaggccttccaggcccagggactgcgcctggttccaggaggtggctttcaccaggtcgctgaggggtttcccggtcaggcggtgcacgtttttcaggccgtgggcgtatttgagggtgctgctagccagggcgccggattcctgcagacgggccacgccgtccttcacgatgatgggtaggccgcccaggtctccggggccgtccggcatccaggagcaggccagggagtccgtaatcatcagcatctggtcagaatccttgtttttgaacacggttttgagcatgtccgcgcagaggtggatggtgtcgcagatgatttcaatcttgatttccctgtccagcaggccggaccccaccaggccgatttcacggtggtgcaggggggacatctggttgcaatagtgggtcaggtgcgccagccccgcggacttcgccctgttgaagtcctcatgggtggcggcgctgtgcccggcggagcagcggatgccgttggccgtggctttctcaatgaattcaatggctccgggcatttccggcgccagggagaccagcagcaccttggcgatggagttcaggttggctacttcatcgtaatccggctggcggacaaaggcgggattctgcgcgccgcagcatttggggttgatgaacggcccttccaggtggacgccgggagtcttggcgaattcctggttcttcatgtattccgccacggaggcgcatacgtcttccagcaccttgggggacagggtgagggtggtcggcagccaggaagtgacgccttccttcattttgcattccgcaatggtgcggaggctttccagcttggcgtcgcaggtgtcgcagccgccggcgccgtggctgtggatgtcaatgaagccgggaaggagcatgcggccttccgcatccacgaccttgtctgcggcgggaagttcgctcccggcgggatagacggcggtaatggttttgccttccatttccacggcagccccgggcatatcaatgccgggggagatgatgcgtgcgtttttaatgagtgtcttcataaaaatgaatggttgttggatggatgtttatcgtcgtttttctccgttcgtccgcgtcttcccgcctggcctccgcttcctgcggaaaaccgggaatgggcggcggcgcaccggagatcgttcatgccgctggcagcttcctggttatctggcggcgtccagggccttgttccaccgggctacgcgggtggcttccgctttcagcacggcagccgcggcgttcttgtccagaatgcggatgtccttgattttgtccccccggacaatggagttgacgacgtcctgccctttcagcaccttcccgaagaccgtatggcggccgtccagatggggcgtggccacatgggtgatgaaaaattgggaaccgttggtgccggggcccgcgttcgccatggaaagcacgccggggccgtcatgcctgaggtccggggaaaactcgtcttcaaaactgtagccggggcctcccatgcccgtgccggtgggatcgccgccctggatcatgaaagtcggaatcacgcggtggaaggtgatgcccttgtagtaccctctgctggcgaggttcaggaagttggctacggtgacgggcgccttggaggggtaaagggccagttcaatatcccctttggtagtggagatgacgacattgacgtccttgaggctggctgtggattccgcggaggcgctgaagcacgccagggcgcacagggaacacaacagaagggtgagatattttttcatggctttttgttttcccccctatgttgcccgaataaaagcagggttgcaagtaaatcgcgcgccctgacgggagaatggcgcggggtgcgccaatgcgggaaggtttttctctgaagagggatttttaaggatgggcgtccggttgccggcccaggactaccttgagccggaagccgcgcgggaaaaacggaagaccgcccacgccatgaagaggctgaggattcccatgacgacgaattgccaggagggggggatgaccagcatcatggcgtattggaacccgacggccagcaacccgagcgcgcagtccaccaggttgccggcggcaatcatgtccccgcgtttgtcattgtccgcccggtcctggaaaaaggcattcagaggcaccaggaacagggcggcggaaatgcccgccgccatcagcagggcattaaagaccggggaagccatggagactgcggccagggccgcgcagctagccgccatcagcacgcctcccgccacggaaacattcatccggatgtggcggcggcaaatcacggaggcgagaatgccccccagcaccgttcccccgctcatccaggccatcagcacggctcccacggagctgaagtcatccccgccaccggagatttccttggccatctggatggtcatcagcatgaccgtgccgccgaagaaccagaaatagccgatgcccatctcgctgacgcgcagattgcggtttttccacagcttgcccagctggtggaagtgttcgtaaaacagggaccaggagaaggggcggccccccccgggagcgtaccggggcaggcggaagctggaggccgccaccggaacggccaggagcagaaacaccaggcatgggaaagaggcggcataccatccgtcattgatgccggagggtttcagccatgcgtcaaaccactggaagaagccctcccccagccagcggtgccagatggtatccgtggaaggctccagcaggtagcggaaccagatgaagacgccgatctgcccgatgagcaggctgaggatggaagccatttccacgatgccgctggcgaaccccatgcgggaagtccccacgatgtccttgacgattccctttttggccgggctgaagacggtggcctgcacggcaaagacgcagaaccacaggatggccccgttcagattgtggacgcgcaggctccagtacatgcccgccagcacgcatatctggagcagggccatgaattggatgatgcgcgccttgcagaaacggtccgaaagccagccgacgaatggggagaacaggatgaagggcagcacgataatggcccccagcggatattccaggtccccctctgcgccatacagccagacgcccaggggaatcagcaggaattgagcccctttttcattaaaggagttctgcgcctgaatcagcacgagccgccagaaagctccccatggaactttgcgggcgtgtcctggcgtgtgggcgctggaattcatgaagttacaggctgggctcctccgctttttccaggccggagccgcggaacaggcacagcacgccgatgacggcggtcaacagggcgctggcaatcagggaggcttcttcactgaaaccgcacatttccgggctggagaacagatattggaatactaccaggctcaggaaggcggcgggggccgccgcttaccagcagcagcgttttttgctgcgcaggtaaatggaaacggcccagagcgtggcggcggccagcagctggttggcccagccgaagtactgccagatgacggcatagtccatgctgctgacggcaatggccgcggcgaagagagggatggcgatcatcaggcggcggctcagctgttcctggctcagcttgaagcagtccgcaatcatcaggcgcgtgacccgcagggcgccgtcccccgtgctgatggggaggatgaccacgccgatcatgaccaggatggagccgacgctccccatccaggattcggaaatcgtctgaatggccagcgccggagcctttccgttggcggtagcccctcccagggcttccggagagccgtagaaggttagtgcggcggcggcccatatgaaagcgatgatgccttccgtaatcatcgcccctccaaagacgggcagcccttcccgctccgttttcagacaccgcgccatcagcggggactgtgtggcatggaagccgctcacggctccgcaggcgatggtgatgaacatcacggggaaaagcgggaaatccgccggatggcggttatggaaaaagtccagatccggaagcacttccatgcggggcaggtgcatccaggccggcatgaaatccgcaaagggagccaggagcattacgcccagaatgcccatgaccatgatgatcagggcgacggaaaaaagaggatagacctttcccatgatagcctggatgggaagaatggtcgccagaaaataatagccgaagataatccaaacccatgccgaaacgctccagcccgtcatgggggacaggatggcggcgggccccacggcgaagacgacgcccaccagcacgctgaatacgatgcagacggcgcggctgatccactgggcctggctgcccaggtagcgccccaagatttccggcaggttttcccccttgtgccgcagggaaatcatgccggagaagtagtcgtgcgccattccgcccagaatgcagccgaaaacgatccacaaaagcgcggtaagcccgtacagcacgcccatgacggcgccgaaaatgggccccagccctgcaatgttcagcaactggatgagaaaaacgcgccagcgcggcataaccacataatccacgccgtccgtacaggccacggcgggagtttgccgggaggcgtccggacggaaaatcctttccagcacccgcccgtaagtgaaataaccggccgccaggaccaatatccccagaatgaaatagcagtaaccgttcatgttggaaaaagggccagccatctcatggacaggctgtccgttcacggaacttaacttttctcccgccttctggcaagccgttagtgaaaggggggaaaatagggaacggattccaaatccgaagtcaacactaaacaatagaaacgagatgtttatacaaatataggaacagcggcgtcctataatcagaagctttgccgcggaagatttaaaaccatcataaaatttacaacaccaattatttatgcataataaagagacgtggatttacttttcggatttggaatccgctaaacggaaaaggttgacaccattcaaccttccccagttatgaagaaaacattgataatcattgcgtccctggctcttggcgcggcggcttcccaggccgcggtgctgtgtaccactacgtttaaccggaccgggacttccctggattccgtcactgtgagtacggtctccgatgcgggactctccacttccacctcgattgcttcccaggacttcagcaagagttctgcgggcaatgacctgctggcttcaggttctattccggcctccgtattctcccccaattccaatgtgggtaataatcagaataatacatggagcgtttctttcacgtttaccaacgacggttcccaggatatgctgatttcttccattgatctttccatgatagggttcactggagcgggcgccgcgcagaatgccggaggcggtgtggccaataacaattatgttgggggagccgacggcaatctgaacaaacctgtcaatatcacccttggcatgagcgagcaggacgatcagacgctggcctataatggcgccaccagtacaaatacatctacgggatcctgggatggcgttcgtacgggaagctatgaatatggcgatgtgttgttgaaagccggggaatccatgacgttaactgttacggcttccaaaaacgaggcctacggcaacggctgttttatcggtcttacgggaattcagattaatggggaagtggttcccgaacccgccacggcctccctggggcttttggggctggccgcattgatgatgcgccgccgcaggctctaagcatcttttttcaaccgggcccgttccaagaccggatttttggaacgggcccggtgcatggcattctgtaacagaataatgcatggaaagcgaattaagaatccggtgtcaacgtaaaattttaaaaagaaaccactttatccctcctgccttctctgaaaagagaaggcaggaattgcctctttttaaattttaacgatttatacaatttattatcaaaggattatattcttatccagcgtaaaaaacattttcaggattcttaatccggtagagaaaagccgagtttctgttccagaaattcagataatctaaagttgccagaatcatgaagaaaacattccctgtcattgtctccatccttgctcttgctggttccgcccattcggctattgtgtttgattatcaggcaaatcctcaagcaacaacgagcttttaccagcctgaaaccaccggagcttccctgaccagtcagacattcactggggtttcaaaccagaaaacgggttccaactacgttgactcctttttgagtcccaatataaatgtcggcaacgggaatgcgtggagcgtctctttgtcctttaccgtaacggaagccgtcaccgttgattccatagctctgaatctttttacattcagtggtgctaatgcggttcagaatagtgaccggagaggcgcttatacctttaatttgaagctgggtgacaatgttttggctagttgcagcaattctaacctgacttatctgggtacgggtgatgttaatgccagcagttcccaacaggccagcgtgggaacgctggggcaactcggagggtcttccggcatccatgaggaaggaacgctgaaccaggcagtaaccctgtctgcaagcaatacttatacccttgagctttccctgaacaagggacaggaaacgcagggttactttgtcggattgggcgccattgaactgaatacgatccctgaaccggcgaccgcctctctcagtattctgggcatggctgcactaatgatgcgccgccgcagacgttgaagcccatgtccctgatacacttgttcaagccgtccgttttttctttgaaactggcggcttgttcattttcagccaacaaaattcggcattttttaacatttaacatcaataaccggtatgattccccaggcagtccgttcttcggcgtgatgtcctccgggtcatcgtttcgtcagccagccatgtttccacactgtttttttaccgttctcctcttttttcttctgttccttgctccagctaggtcggctgatgttgaatatgtctggaggggcgccgattaccagtggggttccctgtccaactggagtgtcggaagcgttgccgcctcttccgcgccaggggccgccgcttccgcctatgaacattggatggtaaccaatggaacggattccgcgggaaggacggatgtcggcggattgggcgcggggggccgctatttgaagggcgtcaggattgcggggcttaacagccagccggaaggcaaaatcccattgttcattaaaaacacgaacaaggatgtatatttgcgcgtggagaagggcggcattactgtggaaaatgccggagaaggaggttattctgcggatttcggggtcgcccagctgcgcgtagccgcggaccaggagtggcatgtggctgaagggcgcagcctgtatgtggggcatgacgatgacgctccgtccgggggattgtattccctgacttcggaaggcgatgttccgcggcgcgtgacagtgacgggcggaggcgccgtgcgcatcggggaagggatgctgctgaacaatatttccggcctcatcggttttgtgctgaacgccggaaagggaattccgacgctggatctggcggaccggggcatgggcaatacggtgacggtggaagacgctgcccgcctggaaggcatgtctttgtaccagggggccctggtgacgcgggaaaacgcgtccgtgactttttccggaacggaggccaaggcgtccggacaatggaacattggcgcggacacggagttggcgctggaaaatgccacgctggacctgacggaggcgggtgtggacggcgacgtgattctttccggctcttccggcattaccggggataagggaacgctgcggcagacgcttctggatgatgcccgggtgacttatacggacaggaatgtcaaggcgggggaaatccggagcgcaggcagcaatgtgacgataacgctgaataactcctccatgcattttgacggagaaataccggcggtggacctggtggtgcagggcagctgcacgctgggcggcagcggcgccttttcaggaacgattacttatgcgccgggaggcaccctgactgtggatggggatatttccctgcccagttcatccctgacgctggggcgtctccatgtggctacgctggacggcgtgccgcaaaactccgccgtccggccggaaacccctgcccagcaggcaagggaatatgtggttttgtttgattcctcctttgaggatttgatttccgaatggccgggcaggcatacgctgggcgtgcagttccggccggatatgggcgcccccgtcaccgtaaaggaactgcctgaaggggcggtttcatggaattatgatgccgcatccggctggctgacgctgcagacggatgtagcggaaaagccggacatgccggcgcatgtttccggagccaggcccaatattatttttgtcctggtggatgacatgggctggggggatatgagcgtcaactggacgcagcaggataaaaacggcaggcaggtgacccgcaggaatgaattcaagacgcctacgctggacacgatggcggcggagggcatgcagctgaggcgccattacagtgcggctccggtatgcgctccggcccgcgcttccctgctgctgggcgttcaccaggggcattcccgggtggtgcgcaacaatacgtttgattaccctatcgagaattcccatacgctgggaacgctgctgaaaagcgcgggttaccatacggcggccatcgggaaatggggcgtgggcggaggcggacagagcggcaaggctctgaccgcggctccccacatgcgcgggtttgattatttttacggaatcatcaagcatttggcggggcattaccattatttgacggcgggttcccaggatatttacgaatataatgaccaggccgcggctccggcgtgggagagcgtcagcgcgaaagttccgggcaccgcctatgatacggatttgttcggggcccgcgccaaacagtggattgtggaccaccatgagaaaactccttcccggcctttcttcctgtatctggctttcccggctccccacggcagtctgtccgctcccgcctgtgcctatccggcggggctgggaagggacggcggcctccagtgggagaaaaaagacggctatgaagcctgcaataccgctgcggacggatggtcgggggtggaggggaacttttctccggattcctatatctacccggaacatgaggtttttggaagaacggaatcccgccacgccacgatgattcgccgggtggatgacgtcctgaaggacatgatccagctgcttaaggatttgggcattgatgacaatacgatgattgtctttacgtccgacaacggcccccacaatgaacccggttccggcaattacggcaacggcgcgcaggagcccgcgtatttcatgagctacgggatgatggacggcattaagcgcgattgctgggaaggcggcatgcgtgtgctagccgtggtacgctggcccggtgtggttcccagcggaatcagtttgaatgccagccagttccaggactggatggctacttttgcggacgcggccggagtgcccgtgccgtcccgttgtgacggcgtttccctgctgcctacgctggcaggggtgccggaacgccagaaaacgggcgttatttatgcggaatatgcctatagcgggagtactccgaattacagcgatttcctccagcaacacagggggagagggcggcagcagcagcagattatatttgtggacggcttcaaggggattcggatggggaatgccgcccccgctacggattttgaaatctacgatacggaaaaagacccgcaggaagcggcgaatctggcggcatcccgtccggacctgcaggagaagatgaaggcgcaggcgctgcgctcccgccgttcctcccccattgcctccaccagttttgacgccggttatatcgcgcccgtttccgcccccgctggcctgcgggagggaaggctgcgctggcgcgcgtggaaccgctcttttgactgggtgccggatttccggcagctggaggaggggccctgttccacgggtgcgacggatgtttccgacgtgctcagcgtcaaggcagggctttccggtcagaagggggtggaattgacgggctatctcagggtgcctgtcaccggggaatatcaattttaccttcagacggattccaatgaaggctccagggcttttgtccatttgcacgatatgcagctcattgatgcggattatgcctatactcccggaacgcaggctgcctccaacgcgcgggaaggcgtttccggcgatgtgcagcccaacgccgttcagacggtgaaacttaccgcggggctgcatcccatccgcatcggctatgtggggaaggcggcttcctcctccctttccctgcaatgggaggggccggaaaccagcggcagggaacccattcccgccagcgcgttttcctatgaatacgtgaatcccttcaatctggaaaagacggaggaaacggtaggatgcgccgcctccggtacggggctgaccgtgcagacgcatcttccctggacagtttcctgcgaccagccatgggttacggtttcccccgtttccggttccggaacctcagtgctggatattgccgtggaagcaaacgggctgcaaacggagcgggaagccgttgtcaccgtcgtatgcggcggggagcagaggacattcacgctgcgccaggaagctgctcctgccccggcagggtacgacaagtggaagcaggaccattttgcggatgggacgccggataagcaaatggccccggatgcctgccccgccggagacggaatttccaatctgatgaaatatgctacgggcatggatcccaaccagccctgcgggagcgtaacgaagctggctgtccgcgaggaagcgggcgggaaatacctcgtgctttcctggcctgtgaatccggaggcgacggatgtgacgttccatgtggaaagttcttccgacctggaggaatgggctgacgaaggggccgtcactccggacggggcctgcggggaattccgcgatacggtcgcgctgggaaaaggctctccggagcgccggtttctgagattaaaggtgacgagatagggaatcaccggtttctctttccgtttcccgatgatgattccttacgggaacagggaccttccggccctgctgccttgccgcccgttacggattttttccggaagcgtgattctgcgtgttccggccctccgctgttccggcgcatccagcgcggtacggccggggacaccgtgccttagccagggaaagaatattactccccgtcattttccgcatcggcagggggggctttgggcaggttcttgtcaatgtcttccagaaggttgaccaggtcaacgccgcgctgggcggagtcgtccagacggaaggtcaggcgcggcgtattgcgcagcaccacgcgcctggccacggcggactggataaggccgtgacgggagttcagtttttccagcacctgggagggagccattttccctacgacgcccacccatactttcccttctttcagatcgtccgtcacttccacttcaatcacggtgacgattgttccgggaaattcaaaatcccgctgaatggtggtgcctatttcccggcgcaggagttcgtttaccttgtcagtgcgtctgctcatatgaagggatagagtgatgaagggaccgattggttcaatcggagaaggaggaataagggaaaggacagggacggaggtttcctggacgcccggaggagcgtgcaaggagctccgtccctgttggatgatttttgttgggggttacagcgtttgctggattttttccagcgtgtagcattcgatgatgtcgcccgtttcgtattcgttgaagtctccgaggcggatgccgcattccagacctgccttgacttcttccacttcatcctggaagcggcggagggtggacattttaccgtcaaagacgggcgtcttgtcgcggatgacgcgcgcctcgcagctgcggaggattttcccgtcctccaccatgcagcctgccgcacggcccttgttgagcttgaagacctggagcactttggcgtggccgatgatggtttcgcgcgtttccggttccagaaggcccagcatggcatcccgcacctggtcaatgagttcgtaaacaatggaatacagttttacctgcacgccttcccgcttgagcagtttgacggcgttggcttccaccttgacgttgaagcccaggatgacggcgtccgaggaggaggccagcagaacatccgattccgagatggggccggcggaggcgttcaggaagacgcattccactttgtccgactggatgtccagaacagccttcctgatggcttccacggaaccctgcacatcccccttcaggagtattttgagctgggctttctgggtgccgtcccccatcatggcgagcagttcttccatgcgtgccttgcggggctgggccaggcgctgtttgcgcagttcctcctggcgttcttccccaagctttttggcggcgcgttcgttttccatttccaccagttcgtcccccacgttcggggtttcagagaagccggtgatttccacgggcatgccgggccctacctttttgacgcgttcgccgtggtcgttgaccagggcgcgcaccttgccggcgtaagggccacagatgaagggcattccgacgcggatggtgccgctttccacgatggccgtggcggagctgcccgtgccgggttccacgcgggcctcgatgatggaggcgcggcagttggccttggggttggcctggagttccagcacttctgactggaggacgagaaggccgagaaggtcgtcaatgccggccccggtcagggcggagacttccacgcattccacatcgcctccgaagtccgtgggaaccagcccttcttccatcaggccgctcttggtcttgacggggtctgcggccggaaggtcgcatttgttgatggcgacgatgatggttttgccggctgccttggagtgggcgatggcttcccgcgtttggggcatgatgccgtcattggcggccaccaccaaaaccacgatgtccgtgacgtccgcgccgcgggcgcgcatttccgtgaagatggcatggcccggcgtatccaggaaggtgagtgtgctgccgttgtagtcaaccgtataggcgccgatgtgctgggtaatgcccccggcttcccccttggccacgcgcgttttgcggatgtagtccagcagggatgttttgccgtggtccacatggcccatgacggtgatgatgggcgtgcgcgtgatgagggtggctttgggttcttccaccaccggcacgggttccggttccttgacgggttcctgctgggctttcacgccgccgcccttttcccgtttttcacgggcgaatgtgtagccgtggaggtcgcagatggaactgacggcgtccgcatccagcggcgtgttcgggttggcgaagatgcccatgcccatcagatccttgatgatttggaagggcttggctttcagcatgcccgccagctcggaaacggagacgggcggcttgaggttgatgattttatcgtctgcggagggttcttcctggggtgcgggcgcggcgggttctgcggcggccggggcagcggcgggcgccggagcggcgtcagcggcgcgcgacgctttttctttgttgccggaaagcaagtcgagagcttctttcttgactggagcagggcgggagggagccggtgcgggggctggctggggtgcgcgtttctttttggaagatccgccgatcagatccaatacttcctttttgggttctttctcttcttgtttattaggcatcttgatttaaggttgttagatgttgagcgccgcgctcaacggttattgggagataaggtcccgggccttgtccagaatttgggcggcttcctctgcgggaatgcccatgctttccgcgatgtcggaagcttcaaatccggtgagggccaccaggtccgttccgcccatggtcaccaggcccatggcggtttcttccgggatttccaattgttcgctgagggttttggccgcagcctggcattggcgcatgacttcttcggccgcagcctggctctggcgtttttccgcttcctggacgtcaaagacgcgcacctggacatcccagcccatcaggcgggaggtgaggcgggcattctggcccctgcggccgatggccttggagaggtctttgtcgtcctggacgataacgaagatttttctggcttcctcgtccacggtgatttcccgcggttccacggggctgagagcttcccggacgaaggtgacggggtcttccgtccattctaggatgtccactttttcattgttgagctcccggacgatgtttttgacgcgggcgccgcgcatgcctacgcatgcccctaccggatctactttgtcgtcatggctgatgacggccactttggtacggtagctaagctcgcgggcgatgccgtggatttccacggtctggtcgcctatttccaccacttccgattcaaagaggcggcgcaccaggttcggatggctgcgggaaaggatgacttccgggccgcgtgcttccgtgcgcacttccaccacgtagaagcgcatgcggtcgccgacgctgtagtcttcattcggcacgcgttcgcgggaggtcatgacgccttcgaatttgccgaggtccacaaaaatatcccctttttcaaaacggcggatggtgcccgttaccagatctccggcgcggtccttgaattcgtcgtagagcatttccttttccgcatccagcagtttctggagcatggtctggcgggcggtctgcaccgcgatgcggccgaagcccttgggcgtgatgttggtggggagcaggtcgtgaagcacggcgtttttgtccagcttgacggccagggaaagggggatctggttgaatttgtcggaatattcttcatccggcaccacttccaggtccgcaaaaatacgcaccttgcccttgtccacgttgatttcggccctcaggtagttgatgctgccggaaccgggaaccattttgcggtaggcggagagaaaggcggactccagagcgaggagaattttttcacgggagagccctttttccctctcgtagtagtcaatcaaagctttaatatcgtttgtcatgagtgtggaggagtgtgatggatagacaaaaaagagcgggtcgacagacccactctcgagtgcctctcggggtgtttgcctatctaagtaagcacgagggggaggttctggcaagaaaaaacgcttgttctatgcggcatgcaaaagactggggatgattcctgaagaagaattttccggagccctccggaagggggcgggacaacggtgtttgagggcttgacggacccgtgaaaaacgggaagtatgcgcgcatgaaactcgtctcatggaacgtgaacggattgcgggcggttctgggcaagggaatggcggacgccgtggatgccctggagccggacgtcctctgccttcaggagatcaaggcgcgtccggaacaggtgaaagacctgtggatttcctcctggccgcaccagctctggaatccggcggagaaggccggttattccggcgtgctgatcctcagccgggtgcggcctctttccacgtccgtcggaatcggctggccggagcatgaccgggaagggcgcgtctgcacgatggaattcgaggggttttacctggtcaactgttatacgcccaattcacagaatgaactggtgcgccttccgtaccgggagcagtgggacgccgcgttccgcgagtatgtggcgggactggcggaaaccaagccggtcgttttctgcggagacttgaacgtggcccatgaggagattgacattgcacgtcccaaagagaaccgtttttccgccgggttcagcgaccaggagcgcgccgggttcacgctgctgcttgaggccggttttacggatacgttccgcgccctgcatccggaggagccgggctggtacagctggtggtcctaccgcgcgggcgcccgcgcccggaatatcggatggcgcattgactatttctgcgtttccaatccgctggcttccagggtgaaggatgccgccatccatccggatgtgacggggtccgaccattgccccgtcagcctggagattgactgctgagcgcggtctttcagatgattttcaactgtaaaagattgatgattatggaacaggaattgccgctgctggtggttgccacgcgcaacgcccacaagaccggggaaatccgcgccatgctggccgggaaatgggaagtgaaggatctttccgactatccccaggctccgcccgtggatgaaacgggagtcacgtttacggagaacgccacgctcaaggcgctttccgcttccagatgcatccccggcgtcctgctggcggatgattccgggctggaggtggatgtgctggacgggcgccccggagtctggtcctcctccttcggcggggaggaagggaaccatgcgcggaataacctccgcatgatggaggaactgcggcgcgccggcgtgaagccgggggacaggccttccgcacggttccgctgcgtcatggtgcttgccgggaacggccgcgtgctggcggagttttccggttccgtggaaggctacatgttgacggagctagccggagaaggaggattcggctatgatccgctgtttgtcccggaagggtatgaccggagtttcgcccagcttcccatggaagtgaaaaattccatgtcgcaccgcgcccgcgctctggcgcaggtggtggagtggatgaaggaacgccgggcctgaggtctttcccggacgcctggcggcggggaggtcagtccagcctgaaggcgcatatctggaagggagccggtgttccggtgttcaggagctggtatttgccggcgcgccaggagtgatggggcagtcgggacaggaaggcttccacggcttccgcttcttcctttcctccttcgtggccgggatagcacatgacgctgagaagcccgttcggggcaatgagagcggcggcttgttccagcgccgccagggtgcattccgtcctggtgaccgtttttttgtccccgcccggcagatagcccaggttgaaaacgatggccttcacggggcctccgaccagttccgccaggcggtcatggctggcaagatggagccggacggaaggggtgagcagcccttccttctccagacgctccctggtggcgcggatggcttcttcctgcacgtcaaaggcgtgcacctggccggaagggccaaccagccgggccaggaaaaccgtatcgtgcccgttgcccgccgtagcgtccacgactgcgtccccgggggagacgacgcggctgatccagtcatgagcgcaggtcatggggcggctgagcagggaacatttcatgaccgggttgtacagaagccttgcctgtatgacaattcgtttatgaaattccggtgcgggaagaatgacaggttgttttttggcagggcgtgtgttaggaagaggcataacaccttctgcgtgttcccgcatgcggggataaaccacagacgttgccatgaagatgactgacagacgcacttttttgaaaaggactgccgccgcaggggcgctggcggccatatcggacatggattctctgttcgcccaggaggccggagccccggcggcttccggcatcccggatctggtggccgtccgcaacggaacccgtgcggagatggtcaggaaggccgtggagacgctgggcggcatgcaggctttcgtcaagccgggccagaccgtcgtaatcaagccgaacatcggctggaacaaggctccgggattcggcgccaacactcatcctgaaaccgttgccacgctggtggagctgtgcaggcaggccggggcgaaggaagtaagggtgtttgaccactgctgccacaacggcgcttatgagggcagcggcgtgaaagaggccgtagagaaggctggcggtgtgatggtggacggcggcaatgagagccagtacgtgcggacggaaaacccgaaagcccggaaattcacctccgccaaggtgcataaggccgtgctggaagcagatgtttatatcacctgcccgcccctcaagcaccacagcggttccgagatgaccgcctgcatgaagaatgtcatgggtatcgtctgggaccgcggggccatgcataagaacgacctgcaccagtgcatcgcggacgccgtgtatttccgcaagccggacctgtgcgtgctggacgcctatatgcctatggtgcgcaatggccccgtggggaaggatacgaatgacctggtggagcgcaaaacccttctggcttcccgtgacatcgtggccattgacgctgcgggcgccgccctgctgaacaaggccggaaaaattcgccatgtgcagcttggggaggaaatggggctgggcgtcgccgacctttccaggcttaatatccgccgtatcagcatggcctgacgcggcggctccttctcccgtctgcggatgacgcggtggggggccaactttccgcctccggcgggtttatgataaatatgtcagtcatcaaagcctttctcgtcagtcctctgaagtggctccgcgtgacggtggccgtcattttctttattgggattgcatacgcttttctgcaccacattcccgcgtggaacgtgccgaacatgacggggggcggagaggggatggaagattccttttccctggcgcggtggcaatttgtgccgtccgtgctggggaccctgagcggggcagccgtttccgccgtgattctgggggttttgctgctgcttacgctgctgttcggccgcgtatactgttccttcatctgcccgctggggattctccaggatattgttttcagaatccgccgctggctggcgccgaagcgtttcctgaaattctcccggcctgtgccgtgggtgcggtatggggtgctggcattgctggccgcctgctgtgtgacggggctggccggtctgtctctgaattggctggacccttacagcattttcgggcgcatcatgtatgtgctggcatggccggtcgccatttggagcaataacctgctggcggcggacagttcttctgcggacctggtccagatggattatttccccgcggctttcccggttctgctggcttccgccggcatgctcggcctggtggccgtcatgagtgcctggaagggacgcctgtattgcaatacggtatgccccgtcggcacgctgcttggcctgctttcccgtatctcctttttccggctgggctttgatcccgcctcctgcaagaaatgcggcaaatgcgtcaaatcctgcaaggcgcaatgcctgaacctgaaggaatacaaaatagattcctcacgctgcgtggcgtgctacgattgcgtgcgctcctgcagtgagggaggaatacgctaccgctggtttaccagggcccgccaactggttccggcccaaaaaaagaaggcttccccggataccgccctctcttcttctgccgcagttccctccattgccgggagttcccgccgccagttcctggaggctactgcggccgggctggctacggccgccctttccggatgccggggagatgccgcccggaagctggactccacccagtgcgttcttcctcccggagccggttccctggaacgttttctggatatctgcaccggctgccagatgtgcgttgccaactgccccacccatgtgcttcagccctcatacctgcagcttggcctgaagggattcatgaaaccccggatggattttgccaccaaatactgcctttatgattgccaccggtgtgcggaagtctgccccacgggggctatacgcaggatgcctgttactgcggaaagggatactgagggaataacaaaagatactacgcgcattgccgtggcccggttttacgtctgccgctgcctggttgcccgggaggacatggattgcggagcctgtacggagcattgccccaccaaggccctttacacggtgccctatatcgggcgtgacggccaggagcaccgcctgcccaggctggatccttccctgtgcattggctgcggcgcgggtgaacacgcctgtcccgttactgcggaacggcctgaggaacgcgaacgccggaactcctgcgatctgtgcgaggaaaaatgcgagttcggaaggcggcgggaaatgcccccccgggcgctggtggtccgtgccgtaaatccccagcagaaagctgttaaaaagtttgaggacaaagctgtggatccggtgggggatgcggattttccgttttgaaaacggctggcggtttggaagatgatgaaataaacgctcccggaggcttcaaacctccctttcgggagggcggtgtctgtccatccggtttttcgggggaattccgtgcagcccggtttgcgcacggatacggcgcgcggggatgccgagatgagcgggggcaggaggagcctgaccgcgggagcgttcccgcggctggcagggaaggttcccggagagcatgttctccgttgctggcgggatagagtgcaaatgcccgattttccttgatgatgcggaagttgatacgttaaagtaaaagaaccatgttgcaggcggacggcattacgtatgagatagaaacaccggatggtcctttgaaattattggacaatgtcagttttaatgtccctcgcggtcattttatggcggtcgttggtccttccggctgcggaaagacgaccttattgaaggcgattgcgggcatgattgcggaaacgggcgggcgttttttctggaatggccatgatttggctgaagaagactttgaaccttcggaaatcgggttcgttccccagttcagcattgcctatgaccagctgagcgtggatgagaatgtggagagcgccgccaggctccgttgccggttcaattccgtggacgatttggacgacagcattgacaatgccctggaggtaacgggaatggaggggattacggaccgggatgtgaaaattctttccggcggccagaaaaggcgcctggcgctggccatggaactggtatccaatccccggctgctgatttgcgatgaggtgacgtccggactggatcccaggtcggaacacgatatcgtgttcctcctgcatgaaatctcccgttcggaaggccgcatcgtcatttccgtcacgcacagcctttcccatctggacaggtatgattccatcttggtcatgcaccagggctgtgtggcttaccacggttccccgaaaaccatgctgcattacttcggcgtttcctcgctggaggagatttacccgaagctccaggatcgtgaaggcccttcctggagccgatcctggagcaagcaccgggattcctattattcccgtctggaacaggaaagggaaaagaaaattctttccggggaactgccggatccggatgccgtccgtcctgcggaggcggagaaggagggggcctccggagaatccggaacggaacgggaaaaggccgtggaggaaaacattccggaagttcccggattcttcacccagttcttttgcctgctggggcggcgctggcgcatctttttccgcgaccgttcccagttggttcttcaattggtcatggtgctgctgtttcccgtgctggtagccatgtttacggacaagggctccgggcaaatcgtggggctttccgccacgcaggatgtccagactgtccagaaggatatggaagcccagcagctgaacatgaagacggggtccgccgtctccggcatcatcatgtttgaggtgattctgctggggctgatggggtccaacaatgccgcccgcgaggtggccggtgaacgcgccgtcatggaaaaggaaaagtatgcgggcatgaggccttccgcctacctggcgagcaagctgtcttatctgagcgttctggtgctggtgcaatccgtctggatgtttgcctttgtggattttttctgggaccgtggcggcggcctgacgcatctgctgttcctgattttggcgaacgccgccatgacttttgtatgcttgggcatttccgccctggcccggagtgcggaccaggcttccctgctgagcatttatctggtgggtttccagcttcctctctccggagcggtgctggcgcttccggaatatgcggagggtttcatacggcccttcatttccgcgtactgggcgtggtccggcagcatctccgccctgaaggacgacgtatattacgccgtcaagaatgtgctggatacggacctgactccctccctggtttgctatattgttctgggcgtgcatgttgcgtgcggcattgcggccgcctacgcgggaatccgccgttcgcgctgggagctttaatttaatgcgtgcgcttgcgggaagtccgttatatactttttccatcagaaattatggcgagacggcgtgcagcaaaaaagaaaagttcctcatcatccgcactggttttgacggtcggggcggcggtttttgtgctggccgttattgtggggattgtcatgttccgagccggggagaaaccgcaggccgggtcggatatacctctggacattctggcggcgaacgcctcccagctttccaataacaactatgcactggacggaacggtgattgaccgttttccgcgcggcgagtccgagcttattgccttcttgtacaaagacgcctccgggcgtgagtacattattcccgtctgtgtttccgctgaggccaggaacggactgaacatcaaccgggaccagcaatacaggatagagttccaggtgaaagatatcaatccgaaggtgcgcggcgtgtgtgtagctacatccattcagcctaaataaacaatcaccctcatcctatgaaatgctgttttttgatgaccctggcctgcgcggttcccgcgctggggcagatgatgtacaaccctcctgcagcaggcggggcgtctaccgcatcccctgcctcccctcccgccgttcagccgaatgcctaccagccttccaggcagggggacgccaagtccctgtacggcaatgagcttcctttcctgaatcctcaggacggcacggtgaccatcaacggaacgacgttgaatatgggcagtttccgggagattgaagcgcgtttcaacaagtacctgagccagccggaggagagcacggaagatgcgaaggaatatcagaaaatttttgaaaagctccacgaaacgctctccatgcgtaaggaaaaactggtggcggataatgtggtgcggcaggtagtggacctgttgaccgccgcttccagcaacccgctggacggaggcgtttccgacgctctctgccaggccatttacaccgcgtggcaggccaggagcaatggaaaaaacaaggggaagatgcttgaggcggtggagagggaaatccgcagcaacgcccagaagatgagcctgatggaaagcggcgtgacgacgatttccggtgcgccctccggccagaagggcgggaaaaagggaacttccaccaatcatcccgccaaaaataacccccgttacaaatatctggaaaagcgtgtagtggagatggaagcccgcaagctgaagctggaaagtgaacaggttctgacggtgacggaagcgaagattgtttttcagtctacgctggttcaattgtttgcccagcggcgttttgaccatgtttccataggctgcggcgtttacagccgcctgttcaatgacggggataccaagctgcggctggataagaattccgatgccgccaagatgttcagcggtacgctgggcgctcctcccaccgtcgctattctggacaacctttcccgggaactggcccgtgactccgaccggcacatgaaggccgtgaacaacctggtggattcccatcattacgtggatgcgttggaacggctgaacgaagctctcctgatcggggaattcatgcctgccgtgaatacgtttccgtatgagaagaagcaaaaactgtatgccttcaaacgggacgtggaaaagttgttcgagttgatgaacggcaaagattacgaagaagccctttccctggtggagaaccttaagaagacttccagggatttcagtacgggccgtgcggagtccgctatcagcgccgccgtattcgccagtgacgcctatatttcccaggggcaggaagccctggccaggggggaccgcgccaaattggaggaatgcctgaaaagcgccattgaaatctggccgaagaatccccgtcttcttccgctgcggaacgccatgatggccgcaggtcagcaatcccacgctctggaggatttcaagcgtttccacaagaataagaattatcgccgcatttttgacaaccagcatgaatttgccgttctggtgaaggatgatccggagctccagaagcagtttgtggaagatctgggcaaaatggccgttattgagcgtgccctgggcgcagcgcgccagcgtgaagccatgcaggacgtatacggcgcctgggaggagcttcaacagctgcgttccagggaccaggaactgttcatcaatgaccaggagctgaatgcccggtatttggacctgacgacaaaggcaagcacactggtaaatctgctgaatgatgcggaaaaatgcaggaatgcgggagaagtggggtctgccctaggtaaatacatggaagccaaaaggctgtatctgtattcccggtttgccaaggagggaattgagtccctgctggaagaagttcttccgttgaactaggcgggtggattccgccggacggcgcgcctgcggagacggagtaattgcttttcttccggaacggtgccgttatgctacggctcatgaaggcagtatacctgtgtttgtgcatgctggcggcgttctgttttccggctgcggcgctccctgcggattgcagccaggtaattgtaggttccgcggacgggtggaatagttcccatgtgcagttgagccttttggagaaggggccgcggggctgggtgatggtgaaggggccgtttccggcgcgtctgggaaaatccggtctggtctggggcaggggcgtcagcctccctcccgccggagggccggtgaagaaggagggggacttgcgctctcccgcgggaatttttgaactggggggcgtatatggaactgttcccgcgccgcagaaaaagcgttccatgccgtaccgccgcattacgccgcgggacatgtgggtggatgaccctgcttctcccctgtataaccagcactttgtgctgaagcatgatcccgtcacgccttgggagttcaagcagcagatgaagctgaatgattacgcccacagtctgaaactgtttatccggcataatgccgcagacggacggcagaaacccgtgccgggtgcgggttcctccatttttttccatatctggcgccgggacggaggagcccctacggccggatgcaccgcgatgagcgaggaaaatttgagggccatgattgcatggctggatccttccagacatcccctttatattctgctccccgccagggaatatctgcgcctgcgcagagcctgggggctgccgtgatattttcagaatccgcctttgcaggcacgcctgttccgccgccccgggacggacagggaagtggtttaaaccctacggatggaagggctgttggatggtgcggctcccgtgccgtgctgcacgttcgttgttgcctggagttccctttctcgtaaatgcaggaagccggcctttgaagaaaggccggcttccgcatggtaaaacggttattgttcctgggactggggagcgggagcttccggctggagcaggggagtggaggtttccttcacttccgccatggaatcctgttcttccctgggcgcgcggtcttcgcggggctgccggggttgttcctggcgttcattggctccgctgaccagcagattgcggcccatgaaaggttggttgtggaggatgtccacggaacggatggcgtcttccatcttcttcatttccacaaaagcataccccttggatttgtgggtgcgggggttgtaaatgatttccacggaattgacttccccgatgcccttgaatacgtcctccaggtcgctttccgtagcttcataggaaagattgcccacataaagccggcggttggagacgggctgtttgggtgcggagatgcgatcctgcctgttgcgggctacgcgggtgttggttttggcggcggctttatccctggccgcatgcttgttattcttggacggacgaatgccgaagaggcccaggaaacgctgccacaaggagagtttggcgggtgcttcttttctgtacttgggacggtaaccgctggaatcgcggcggtcattgccataggagcgtccgcccttgttgtagcggcggcgagctccctggccctgtcttccctgtgtgttgtgttgtgacatacttataatgctaagttggtgattatgttggtgtcatgccggatttatcgctgtgtgcagtaaattccatccggaggatcgccgggacgttccgctgccatgagaaaagccaggagtaagggggccccatgccccgatcaacggtccatgcatggtctgataggggggcgatcaggctaggcgcgtgaccagtccggtcgattgacgcgtataccaatgcacagggagccggattcttgcaagccggtatctcgtcattttaggctttccgaccgcccggaggcgggaaggccgtccgggaggcaggcttccgtgccgggcatggctcagcgtgagcaaacaatttgacaaaaagacgaggacggagcattttaaatgccgactaatctacatattctctcgatgctgattcaaaatgcagaccgtactacctacgggattaataagattgttgttttcgtccttgcgttcgtcgttttcttcgttgtcggatttgtgtcctggcaatgggatggggtcgctccggaaccgtggcgtctgcggacgctggtgctgacgccgctgacgatgtctctgctgctgtatgtgtgctgtgaccagttcggcgtttactaccgctgccagacgctctgggaaagcatccggcggtttgtggtggcatatgcctgttttgtggtgttaagcgtgatgatatggaagttctttgttcccttttccgcggatgtcggtgtccagtccctggcgtatctgcttaccttcctgggttccctctggctgcgtatcagccggttccgggcggaaaaaaggctggtggaggaagcccctacgctggtggtgggaactccggatcatgtgaaagaattccgcaggacgttggagagcaatcatgtggacttcaggaatgggttgctggtcatggcgcctgaagaggtggacagtgcggtagtcaggaatttgctgattaagaactgcgtcagcaaggtggtgtttttgccggaggaggtggattcttccgtggcgcggtgcctggtggaactgtgcggcaagatgggagtcgatttttacgcgagcatggtggtaagcatgcctgccgtgcataaaacctatttcggcgtgattggaggaacaagaatgctggtgtacaaatccacccccattccctataccacctcctggcagttgaagaaaatgctggactggacgggagcgctggcgcttctggtgggaacgtcacccctgtgggtgctggcggctgtgggaatcaagctgtcggatcgcggcccggttttttaccgccagaaacgttccgggctgtatggccgggagtttggcatgtggaaattccgcaccatgtaccgggatgcggataaaaggctggatgaagtgaaagcccagtacggcaatgacatggacggccccatctttaagctggagcacgaccctcgcattttctccttcgggcgcttcctgcgcaaattcagcatcgacgagcttccccagctcattaatgtgctgaaaggggaaatgagcctggtcggcccgcgcccgctgcccgtttatgaaacggaagcctttaccagcgatgcccaccgccgcaggttgagcgtgctgcccggcgtgacggggtactggcagattgccggacgcagcaacatccgggaatttgaaaagctggtggaattggatatgaagtatattgacaactggtccctgtggctggatatcaaactgcttctgaaaaccgtcccggcagtgcttttcgcccgtggggcaaagtagcttcctggtctccctggattgcaggccgtcagccgttattgccgggaatttggaatccggctggggttctctgtccggtggaacaggcctgttttaagaatactgcaattcgggagagggatggaattggtgtattctgtggaaaatgaaaaaaattattgccggacagagactttaatcttgaggtgcggaaagggatggggcagaatcaatctactatggatttagttcagcgagaaatctctaaagaaacggtgactccgtatttcatcgagtatttcggtcaggcgcctactcatgtggcagcggcaccgggacgtgtgaaccttattggtgagcacacggattataataacggttttgtgatgcctatggcgcttgataaccattgtgttgtggctgtggctccctcccccgtgggcaaacaccgcttttgcggttccctgggtgaccagatccatgaaattgcagtggaagacgccttggttcccggcgaaccgttctggtccaattatgtccgcggcgttttggccaacctgcacaggcgaggcatagaaatcgggcctgtggatatgctgattgacagcaatgtgccccgcggcggcggcctctcctccagtgccgctcttgaagttgccgtctgtacggcgctcgccgcttttgccgacgttgaaatagatcccaaggaagtcgccctcatcgggcaggccgtggaacatgaattcgtgaacgttccctgcggcatcatggaccagtttatttccgccaacggcaagaagggcatggctctcaagctggattgcgccacgctggaatatgagctggttccgatgaataatgagtccgtatccgtgctggttctggacagcgctgtgaagcattccctggcggacggagcttatggacagcgccgcaagcagtgtgaggaagcttcttccatcatgggcgtaccctccctgcgggaagctacgctggagctgctggaatccttcagggaacagcttggcgatgtgcgctatcgccgcgcccgccacgtcattggagaaaatgcgcgtgtgaacgcttttgcgaacgccctttcccgcggcgattgggatgaggccggcgtagccatgcgcggcagccatgcttccctgcgggacgactatgaagtttcctgtgctgaggtggatacccttgtttccctttgtgaccgcattccctccgcatcctccatttacggcgcgcgcatgacgggcggcgggtttggcggatgcattgtggccctggtgaagacggaggatgtggaaaaggtggcccaggagcttctggacggctactgccaggaaacgggcattgaaactacgtatcttgtaacccgtgccggagaaggcgcccgtgttctgtaccaagcttaatccatactgatgatgaaaacactagcaaccatattcggggcgctcgccctgatgacgtggggcacagttgcccaggagggtcccgtacctgcaacggcagctgatgcgcagcccgccctggccgctccggccgcgattcccgctgttgaagtccagcaagcagcggaaattcagccggcggctcccgccgcagaggctgtacaggctgaacagaccgcctctgcggagcctaaaacggcccctctttccatggtggaagtcattctcttctgcgtggtcgtggtgggcgtgatcgccctgggcatctggaagagccgtgaccccgaagaaacggaagaggaaaagaaggccaagggagcttcagactatttccttgcttaccgcggtttgacctggtggctggtgggtttctccctgattgccgccaacatttccacggaacagtttgtggggatgtccggcaaatcggccaactgggtgggcatggccattgccgggtatgaatggctggccgctatcacgctggtggttgtagccttctgcttcctccccaagctgttgaaaggcggcgtatatacgattcccgaattcctggaataccggtataacacgctggcccgttccctgatggccattgctacgctgctgattctggtaggcgtgccgactgcgggcgtgatttacgccggcgccaaggtgatttccgtgttcttcacgggatactctgccatgggcattgacttcggcaacatcaccgtcggctgcgttatcattgccttctgcgccacggtatacgtgttcgtgggcgggttgaaagcctgcgcctggacggacctgttctggggcgccgccctgattgtgggcggcggcgtggtggcctattttgccctgacggagctcagcggcgcagacccgaaccatttgattcaatccgccgccgccaattccggcgcgacggtcgcctccctggggaatccttcggacagcctctggcatggggtgacgcgcttttttgagctgaactccggtgacgcggccagcggcgtaaataccgtgggcggcaagctgcacatgatccgtcctgcggatgatgcggaaatcccgtggacggctctttgtctgggcctgtggattcccaacttcttttactggggcctcaaccagtacatcatgcagcgtacgctggcttccaaatccctggcggaaggccagatgggcattgtgttcgccgcattcctcaagctcatcatcccattcgtggtggtggttcccggcatcctggcctataacctgtaccgcaatgacctgaaggaacaggcggaagtaaaatacgcggcggaaatccgtaagacggaagatcccgccgcagtcaagggccgccccgtcatctacaagcttacggacagcttcctggtggaaaacgtggaggaaggctgtgcccatgccattcataacgcggaagtaatgaaggtgggcgaagatgttatggccaatttgaaacaggcctgcgccgatttgaaggcggatgccgccaacgaccagactacgctggcggaacgcgccccgttcgtggaaaaaatcgcttcccttaacaacaaaatcatcaagcaggccgtggacaactcggataactactatctgacggatacgctggtaggctttgactatgactccgccttcggcacgctgatcaggaagctgcttcccggcacgggctggacatggtttgtgcttgcggccctctttggcgcggtggtgtcttccctggcatccatgctgaattccgcttccaccatctttacgatggatatttacaacaagctgcgcaaaaatgcggggcccacggagctggttaccgtcggcaagattggtttgctggtgtgcgccgtgatcgccctgaccattgctccgttcctggacagcccggcctttggcggcatcttcaacttcattcaggaattccagggcttcctgagcccgggcgccctgtgcgtgttcctcttcggcttctttgtgcccaagtgcccgcgcatcttcggttggctgggtatcgtcattaatgccctcctgtacggaatcttgaaggtatggcagccggaaatggccttcctgaaccgcatggccgtgtgtttcatcacggtagtggtcatcggcttcatcttcacggcggtgaacgctgcccgcggcggacagcctatcgtgctgcccgacaggggcgtggttgcccttcagtcctcttcacgggctaaaatcttcggatggctcgtggttgccgcgacggttgccctgtacatcatcttctggtaattcagggaagacctccagtcccgtattttcaatcctcccggttcaggccgggaggatttttcacgtccggaacagaccatgcagctggcgcggctgaatattctggaggcggaaagtaagcagactggcgtttccggacggaaacggcgccttgttctctgaataaaatacatggttgaaaagaggccggcaaaacgccataccgcctcttattcctcttccagaagcatgctgcgcagggaatcgaaaaagtttccggattcctcttccgtcgcttccgcgttcatgagatcctcccatttggaatattccatcaggtggggaggaatttcactaaggaaggaggagcgctggcaaggcatgcggtccccgtagcgcaggcgcgtggcgcaataagtaagcatgagtttctcctgggcgcgcgtgatgcctacgtaaagcaggcggcgttcttcgtcgcaattgccgtcttccagggaacgcttgtggggaagaatgccttcctccagccccacgaggtacactaccggaaattccagtcccttggcggcgtgcatggtaatcaggcatacgcctggcttgttttccacgtcgtcatcattatcctccttgtccagggtgacctgggccaggtagtcccggagggtttttccgggttgccagaagttgcggagggaggctttcacgtccccgatggacaccagccgtttctggatttcagcttccgttttgcacaggcgcgtgacgtattcgctgaatccggtttcctcaataagctgctccaggatgtctccgaagtcggtttccttatcctggaaaaggtcaatgtattttgcaatcagttcattgaatgcctgcacgctgttgcgggcgcgggtggaaagggccgccaggaattcttcgtcctggagggctgcccagacgctgttgccgtgctcccggctccagtcgatggccagatggctggtcagctcgctgatgccgcgcggcggcgtgttgaggatgcgcagcaggtattcgtcagcctgcgggttttcgatagtcgccagataggaaatgaggtctttcacctccttgcggtcgaaaaaactttgcgcgcccaccatgcggtagggaattttgtgttcccggagcgtttgttcaatgatgcggctctgggtattggcccggaacagaatggagaaatcctcccagggccggccttcctgcctgcggacgttttcaatgtccgtaatgatgaattccgcctcttccgcgtctccgggcatggaaatgagccggacggcttctcctccgcctttgtgggcgcgcagcgtcttgtccctccggcccaggttgtggcggatcagggcattggccgtgtccagaatgggggcggtgcagcggtaattttcttccagtttgatgacggagggatttgggaaaaaacgttcggattccaggatattgctgatctgggcgcctcgccagccgtagatggactggtcgtcgtctcccactacgcagacattgtgttccggacctaccagatggcccagcaggctcatttggaggctgttggtatcctggaattcatccacggtaatatagcggaagcgctgttgccacgcctccctgacgtcccggtgctccttcagcaatttgtccgccagaatcagcaggtcgtcaaagtccacggaattctgcgcctgaagttcccgctggtaggaggcggcgatgttggctgtcaggttgtcttcaatggagtcaaggcccagaccgctgtttttcatccggctcatggaagaaagcacatctttgggcgtgattttctccgtaatgccgccgtggcgcacaatcagtcgccggatcaggccgctttgctcggaaccgctgtaaatggtgaaattggtcttgtaccccaggcgccctatatcctctctcaggatgcgcacgcagagggaatggaaagtgctcaccattatttggcgcgccgccttgcgttccaccatctggcctacgcgttcccgcatctccagagcagccttgttggtgaacgtcacggccaggatgcttttggggctgatgccacggtccaccatatgggcgatgcggcaggtgacggtgcgcgttttacccgttccggccccggccaggatcagcacgggcccctgcagggtctgcacggccttcctctgggccgcgttcaggctctccatggaaaaggatttggccatttatacgtcaaaatggatatctttcaaattcgggtggtcggcaatgagctgggagatattcatgcgcgtgctgccttcaagctggacgtctgtcaccagcaatcctccgcttccgcaggcgatcaaaagcccctgctccccggcggagagcacctggcccggtttcccctccgcttccgggaggatggaaaagccggggaaaattttcatgttgcggatgcgtttcttgcggttccagtagttggtgaaagtaccgggccacgggtcgtacgcccggatcatgcggccgatttcttctgcggggcgcgtccagtcgatttttccgtccgcccgcaggagcttgggggcgtatgttgccaggatttcctgctggcggatgcgcgtggccgtccctttttcaatggaatggatgacgggcagcagcacatccggcgtcatcctggccagcttgtcatgcagggtgcctccggtttccgaaccttccaggggggtgctgatctgggcgatgatgtctccggcatccagcttcctgacaatgtgcatgatggtgatgcccgtttctgcatcgccggatttgatggcggactggatgcaggccgctccacggtggcgcggcaggagggaggcatgggcgttgatgcagcccatgggcgccatatcaatcacttcctggctcagaatctgcccgtacgccatgacgacgatcagatccggattcagtctcctgaggttgctcagcgcatccgggctgcgcagggaatgcggctggagcacgggaatgcccgcttccctggcaatatttttgatggccggggctgtaagcacctggtgtctgccgacagggcggtcgggctgcgtgaccaggcctgccaggtccgagtgacggatcaggctgcggaaggcgggaatggcaatgtcgcctgtgcccatgaagacgatgcgcatggctggaagcttgccctgacggcctgcgcaggtcaatgttaaatagggggagagaggaaatatcagctatgggcgactctttcaattttgcacccggaagggaacggaggaaggataatgccttttttgcgaaggataagatttacccttaataataaatatagatctgcggattagcaatccgggcactcttcaaatttaaaagggagttcaaaagattatccccttatgaataacataatccatttctgtataggcatcatgaaaatatggcagccttcctttgctgcattccatccatgtctttccagcatccggcaggcaaaaagcagttcgaattccatttcataaatattcccataaagtgcttatctgtaaaaaaattcttgcgcccggattgctaatccgcttattctgtccctcgttgggttgagagatcaatgagtgaaacttatgtcgattaatacggataaaaacaagattcaggtagccttattgcgcgggtgctttgtgttgctggtggtaatggccttattctttttctgtttaagaattggccaaattaacaacgaatgcttatatggtggctggactgttagtgagtggcttattaattatgagggaggatttgttcgccgcggcctctgcggcgagattctttacggattatatcaggttcatccctatccggtgcgtgatatgattctgatattgggctttacaggttttttcttctttatggttttattgattggcctgttccgcagggagggctggtctcccgtgttgctgatcgctccctgccttattcagattcctacgtttttgggcgggaccagtctgtttggcctgcgcaaagatcattggctgctattattggcctatgggattttttatttttacaccaggtatattcgccgtagggatatattgagtctggtgacaatgcaattcctttccgtagttgttctgctgattcatgaagccgcgttcttttttatattccccctattgatagtgcattcctttctcataacttataaaaaaaggccttgcggggagttggtgggcgccatgtttttactctttcttcctgcggcattgacaatgggggcggtttgcctgtttaaggggaatcaggcagtagcggaagcgatatggacgtcgtggaaaccgtgtatggaggcgtatcccctgccttgtgatgatgtcgctgaaattgggccgggagtgagtgcgttgacatggggcacacggcaggcatttaaaaatcatataacgatcacttggatgagctggtttttgaaactggggctggctccagatatagggatctcctggatgagctggtttttgaagccaattccttcatggcctttcgcattaattaatattgccggaatttattatttggtttctcgcctcaatacggtgaatttgagatggaacaggctgaaaaaggtcgatagcagccgaatgggcctttttttattgttgcagggtatttttatgattcccttatttacagtgctttcctgtgatcttgggcgtattattccttattgggttttttcatctttgttcgcctatcatttcctgaaagaggatgcgtctgtattccccgcagggttgaatagagcttcggaatggttgcaggataagataagcaaaataaagtgcctttctgttccgtgggtttattttctcatcctggtgtttttgcccgtctccctcgttggtgtcaggtgggaggggtgctttctatctttagcctggagtctcgtcagaaattacatccagtaggagcttgtgggaaaatatgttatcatggggcagagaaactgtttggaaataggccgataaattatgaaggattttatattactgatgcggccctggcagtgggcaaagaatcttttcctgtttgctcccctgtttttcagcggctgtttcctgaaggcggatcttttcgtcgcgacaagcgtcgccttttttgcttactgccttgcggcgtctgccatctattgttttaacgatatctgtgaccgcgagtctgatcgccttcatcccagaaaacgtttaaggcctgttgcttctggaaaaataagcgtctgtagcgcttctgcattggcattggggctggcgctgtgttcggcaggtgtcctgctttacttttcaggaacgcagaggtggatgttgtgcggctgcgttttcttttatttactgttgaatgcagggtattgtgtctatttgaaacggaagacgttgattgacgtatttgttatagcgtttggatttgtgctgcgtcttttaaccggcagcgtggcgccgggaatcagtttgtcccattggctgctgctgatgacttttctgctggctctgttcctggctttggcaaagcgccgggatgatgtggttatttatgaaaataccggtgtcagtatgcgccataatattaaacgttataatctttctttcatgaatcagagcattgccaccgtagccgctgtcaatatggtttgctatatattgtattgcgtatctccggaggtaacggaacgcctgggcaataactatctgtactctacgtccctgtttgtccttcttggcatgctgcgctacatgcagctgacaactgtggatatatgcagtggaagcccgacgcacgtattgatgcatgatcggtttatccaatgctgcattctcggctggggaatattgtttaccgttatcctgtatttatgaagaggacggttgctgtctttgattttgatgggacgctgacttgttcggatacattgctccccttcatgaagttcgcgctgggaaaggttgatttcatcatggcattgctggttaattctccctggctcgttgcctatgcctgcggggtttatccgaactggaaagccaagcagcgtctgttctccacttgtttttccggatggacatgggaaaggttctgcaaagctggagaacagtttgccgcctcaggtatttcttccctgcgtccggagatgacttccgctcttgaggaactcttacagcggaatgcgtctgtttatattattacggcaagtatggagccttgggtaagacccatgctggcggactatcattctcttgtgtttttgacaacccggccggaggtggtcaacggaattctgaccgggaaatttgccggagccaactgctacggccccgagaaaaaagagacgcttgctggaggtggagccgtgccggggaaattataccttatacgtttacggggatagccggggagatagggaattgctggaatgggcggattatccgtgctggcgggtatgggaagggaaatgatgaaaaagggggaaaagccgggttatcgggagatggcgcgttttattgctgccggtgcgatggctgcgggaattcattacggagtttacgttcttctctcttacttcctgtctcctgaggtttcctacgccttaagcggatattttataagttttctatttaacttctatatttcctgttattttacctttaaaacctgtgccacatggcggaagagcgcgagatttttgctgtgccatataattaatttccttatccagctggggcttttccatatttttctgaccatgcctatccctgaactgcttcttccattgcctgtgttaatgatagcagttcctgtaaatttcctgttggttcgcctggcattgagataaacgggcctttcgtcccgcaagaagttcttcccgactggccggaatattggtatattctgcttcatggagaatggaagactgccgcgcattctgattgtgactgcaggatacggggaagggcacaattccgcagccaggggcgtgagggatgctctcgcagggcgcgcggaagtccgcgttacggacttgtgcgcggaggcgatgccccggatattccgcctgacgcgcgccgcctacctgtggacgatctcccgcatgccacgcctctggaaatggatgtacgaggtgagcgacaggcgcaatatggcggagaagcccgtcaggggaattgcccccgtggagcacctgctggaacgtttgctgcgggaatggaagccggatgccgtggtctgcacctacatggtatatccctacatgctggattccctggcctcccgcacgggcagggcggttccttacctgaccgtcgtgacggattccttcgtcatcaataaatcatggctgtgttccaagtcccccctctgggccgtaacggacccctggacgagggccatcatggaggaaaaggggctgccgcaggacaggctgcgcgttacgggatttcccgtcaatcccgtgctgggagcgctggcggaggaacatcccctttcctggaaagaaggggagccgttccgggtgctttactttgcccagcgttccgcacggcatgcgcgggcggagctggcgggtatgctggatgcgaatcccgccctgcatgtaacctgtattctggggcgccggttccggcgcatttatccccgcatccgggatttgcgcgccagatacggacgcaggctgacggtgcgcggctggacgcgccgcgtgccttcttatcttgccgccagtcacgtagtggtcgggaaagcgggaggagccaccgtacacgaagtgcttgcggccgcacgtcccatgctggtgaactttcttcttccgggccaggaggagggcaatacccgcctcctggaaaaactgggaggcggcagccatgtgccggacgcccgtgccctggcttccgctcttcaggaaatgatggcggacggcggcgcacagtggaggcgcatgcatgaaaacctgctgcgggccgggatgaccggaggaagcggcagaatagcggatttggccttgaaactggcggaggaacatactaactgattcccgtgacctatcttctgattgacaattccaacacacgcaccaaattcgtgctctcttcgccggaagccctgttaccggaacggtatatggttcccacccgtgaggtgagcggggaacggctggacgaggtgctggccggcgttcgttatgatgccgccgtggtgtgttccgtcgtgccgcgcgtggcggaagaactgaaaaactggatcgtcaaaccgtgccatttcctttcctgcgattcccggttgggcgtgggcattgactatccccacccgcgccagataggggccgacaggctggcgaatgccgtaggagccgcggcctattacgggcatccttgcgttgtggtggactttggcaccgccgtgacttttgacgtgatcgggccccaatgtacctacatgggcggcgttattgcgccggggcttgccagcatgggggattacctggagcgcaatacggcgcttcttcccgccattgacccccaggagccgtcccgtgtcattggaaccagcacagtagaggccatgcaatccggcgccgtgtacggttaccgggggctggtgaaggaaattctggcccggctggaaggtgagctgggcgtgcgtccggccgtggttgctacgggaggggatgcagctctgatcgccaggggagtggagcgcattgaccatgtggaccctgacattacgttgaacggcttgcgcatagccgccggactgaatctttaaagaacggcccaaatcggctggaaacctgctgcttccggctccgtggccggatgacgcataaaaactcataaataggtgttgcaaatggcgcataccccatgtagtatcaatgaaccttaacaataaatatcatgtctgacaacagcatcgaagaaaaagtaagaagtatcatcgtcgaccaacttggcgttgaatccgataaagtgactgctgatgcgaaattcatcgaggatctcggtgctgattcgctggataccgttgaactcgtgatggctttcgaagaaaactttgacatcgaagtgcccgacgaagaagctgaaaagcttcagtctgttgccgacgtcgttgcttacatcgaaaaggttcagggttaagttaaactgctaaaaatcctttattacaaaagcggcttccctgtccaaggcaaggaagccgctttttcatggaaagcctttccgccttttcttccatgagcgacctgccttccttttcccgtgacgatatccgctatgcggcggagatgacacgggtggtgtatgaaccggaccgccgcattgatacttttggcgataccaggtttaattttcttctcctcagcgaactgatggatgaggtgaacgtggtgcgcgtgcgcagcggctgggtggaagcggagaaaccgaaaatcatacggccttccatttacaatgaaatcagtacggaggggttttccggagaagccaagcgcttttttgactggctctccaaaaacggttcaggctttctgacgttgttggaatacgggttcaggttcaaacggtcggaggtgagcgaggaaattctgcatgaaccgcttgattccgtgcgtggtaagctgctggaccaggtgcgcaatggagaagatacattcatggctctcattgagggagtggatgacgcatgggaggtctccctcttgaaattcacggtggaaatgatacaaaaatcccatgaaatcaatatctttgacttcaagcgcaaaggtcttctttagccttttggcggtggctttctgtgcccagggagttttggcggacggagaaaattattccctctggccgcgccgtccggaggcccttgctgaagcccgccgcctgatggaccgcggcagtctgccgaaagctctggaactgttgcagcctctggcggaacagggaggcgtggtagggaaagaggcgaaggaactcatcggaaggctgcgcatccgccagttgctggatcccaacggaccggacgtgaaaaaatataccgtacggaagggagattcctggatacgcatggtcagaaaactgggttgctctcaggccatggtggttcacctgaacggtttgatggatattcccgctcttcatgcgggagatgtattcaagtaccggcctctggatttccatgtggtggtgaacgtgccggaaaaggaaatctgcctttacgacgggacggattttgtcaagggataccccatcctctccatgaaggacggggggaaaaagaatgtggaaacgaccgtaaaggatgagcaggcccccgtgtccatctacagcaggcagtttccttctgcggataagacgctggtgctggcggcgggaggctatgtcattgacgctgcccgcggtacgccccgctcgcctgggttttatctgagtaagcaggactgcaatgaactggccatgctgaccaggccgggaacgaaggtgactatcctgagggggaaaggagaggaaccgtgaggctggttattcagcgtgtcagtaaggccgccgttcatatcggcggtgtttgtgcgggggccgtggggtccggtctgctgattctggcgggcattgaagaggcggatacggaagaagatgtgcgctggctcgccaacaaggcggcggccatgcgcattttttccgacgcggacggaaagatgaatctttccgtaagggaagtgagtggaagcgtgttggtggtgagccagtttacgctgcatgcctccacccggaaagggaacaggccctctttcatccgcgccgcgaggcctgagcgggccattcccctgtatgagctgtttaagaaggaattggcgtctttgctggaaggcagggtggaaagcggcgaattcggcgcggatatgcaggtttccctgattaacgacggcccggtgactattttcatggattccaggaaaagggaatgagagaaaggatcttatatatttaactttgccccggtttcctgctttctctatatctccatataaacatagaaaaatattgccgatagatctgtcgctcctcctgaaaatctgtccttgagaaaggaggaatattacgtctgcacagatccgaacttggccctgaaatagctaaggccggagttctactggctggacgaaattttccgtagcagccgcctgtccatagggagagtaatcgtaagccgccgcaacagcgccctgtgcgtcgaggacctccgacacattcttgttgaagtccatgccgtagcagtacagggaagcgccctgcacgagggccagggggcgggtggccatctcttccagagaatcccacagcagggtgccaagcacgttacggttgttgatcatatcctgcgacgctagttacaagtagctacggtcattctatttaaggatttttagggaatccacattttttatgattttttgtcatctttgatacaattgttctgatactattatatcattggaaaatcttccgattcaattctcttcctgtattctttataatacactagcttcttataaaacaagtctgaaaagatttttttcatgattatttcaattagaatcagatttattttttattttcttcaagacatatgttattctgaaacattcaatgactataatgagataaccaagaattaatactgtatatgatattaaaagttcattcgaaaagttttcccataatagatttataccatgatacattgttgacaaaattccaattattccagagatcagaaataaataaattgtgagtttgataattggaaaagggaagttattaaatgaaaaattaagagtatttttttttaaccaaacaagaattcttaaaaataggattacaaaaacacatccataaactaattcaaaatattcatatacagttaaaggagactcagggtaaatcataatacaggcaactaattatatttcgttcattatttagaccatatttttatattttcattaaaagatttgttaataagttcttcgttttgatctatgataaatgggatttttaaagtagcgtcaatcttaatatatcccgttgcatctaaagtcaaatatattggttttgcgttcaaagttaatccagaacttatcttaaaatcgatagaataagatgcttgtatataagatgatagtgtaatacctgcatcaattctgtgagaaaatcctaataattcttcccgataggatgttaaagttttgccattacaattgtcaattttaagtattttttcattacttaatccagcaatcatagtttttaaaaaatattcaatatcaggaaaaataggtcaccatttttgtttaattttaagccctatacctacacctataccaacatctgttcgtaattttgcttcaatgcatacacaatttttctttttttctactgatatacttccctcaataataagaagaatgggtatgtaacccgcaggaatagtcattgtgtagccaaattcgttagtttcttttccgagataatcaatagaaaataccactccattatcaacaaacccgtacaaattccatcctccctgttcagcaatggggtcacggttgatccatctgccgtcttttgggttgtaaaagcggtaattgtaataggccagggcggattcttcgtcgtgcatctcgccggaccactggacgggctggacgaggctgcccgtaccggtcacggccccatagggggagtaatcgtaagccgccgcgatcgttccctgtgcgtcgaagacctccgtcacattcttgttgaagtccacgccgtagcagtacagggaagcgtcctgcacgagggccagggggcgggtggccaccggttccagagggtcccacagcagtgtccgaagcacattccggttgtccagcatatccaatgccgctatttgtaaatagcctcggtacaggtaccgttcgtggctggtgaccgttccgttttgggtcactttcttcatgtagcggcgtcccaggtagtcgtagccgcactcaataatcgtgtttccattccggctggtgaagctcaccgcgcggttggccgcgttgtagaccacggtccacacgcccgttgacgtcttgatcaaggtctggttgcccgaggcgtcgtacgtcggcacaaaaggcgtttccccgctttcttcaatgccggtgtactggttgagctcgttggccgcgtaggcgagttcctcggccggttcccgtgccgtcttgcggttgccgatgttgtcgtagctgtaaccgtagggggcggcgcccagggtggcaacggtgagttcgtttctgccgttgtagctgaagctgtcgctgcggaggggttccgttccacgctgctgggtgcgggtgaccgggcgtcccagggcatcgtagccctggctgcgggagaccagcacggtttcccccaggcggcagttgatttccgtgaccagctgccagaccgagttttccggttccagctccgtgcgcgtgcggagggtcgtgagggcgtcttcccccgtgccctgccgcatgttccacgccaggccgtcgttccaccaggtgacggcgtagggctgcctggctggcgtctgttccgtgatagtgaacttttcctcagcatccagggaaagaataaatgttttcaagggagcgcccgtaacggtataaaatccctgtccgtccgttccggtgatttgcccaggggtatagagcgcgatgacgtaacccgtggaggtgacgttttccacgttgagcaggccgtcccacaggttccagatttgcctcagcgagccgttttcggcatatttgacgtccagataggatgacgcgttggagatgacctgcctgtccgtggtggtgtaggagaggagcgttcccgtttccgccgagaagaggtattggctgccgtcttccaccacccagcgcaggcaggattgtccttccgccgtggccagcgccgcacgccctccgcccgacgtgtccaccccgatgggcagcacggacccgtccgtgtagcagcgcatggcaatcacccggtctccctgcaccaggttgaaccgcactcccggcgcaatgcccccttccggcacgtccagacggctgttcaggggatggttgtaggccagtgaggagggtctttccaggccggagacgttttgttcagccctcagttccacccttccggccggaaggcccccaagtccacggaacgccccgaagttgcaggaccagtacatcagcgtggccgtgctttccgccgtcacgctgcaccccgccgagctgtagtttcccaggacgccgctttccatgcccgcctcagggcccgaccgggccagcgacggggaaggcggcgttccgccgctgttgtcgcacgtgtctccctcgcagggacacggttcgggttctttcctgccccccggttccgtcggcaccacgtcgatgctgtagttgcagatggaggtgttgccgcttgccggattgtagtcgatgttggtctggctgacttcccagctgtaggtgccggagggcagctgcgccccgccggtccccgtatggtatttgtgcccgccctgctcgcccgccgtctgcgggttttctttcagatccacctgcgccaccacgttgccgccggagtcctttacttccaggcttccccagtcgtccaccccaaggaagagcgagcaggtgccgtagagctttttgccctcctccccttccgggatggtgaatgtcccgtgcgcgctgtgcccgtccgccgacgtgctcggcggccccacggttctttcgtcatggatccggattgcttcaaacggtagcggatcgggctccggagctgcctccatgccccgcctgccggggctgccatcggctccaaagtaccatttccggtagccgggaacggaagaacgatgggcggaggaggaacgatgaggcggattcatcaggtattcaagagttgggagtaatgaatgatgcgaggggggccgccctttcctgatcgttttatcaatagtatgatccgaagtcggtgtcgatagaattttatttgtatgtttttgcttttttataaaagatagtcattattttacacgaaaagataatattataattcttacgctcagtgcattcccttaatagacatcaatgttgtctgtttgttagaaaatgttttcctctcatgctgagcccttgacaggaggccatcccttccgggcatcagtctaattcctgtaatcaatgtttctttctctcgaagaaagatgggggccgtcgctgtcggacgggggcttgcttaggtttcgtccggcatttccaagtacggtttcctggattactggaacccttccggtgtaacaattttttacgctgcgcgacgatgaggaagcaactgtctggtattttattcctggttcaaggaaacctggtaatgaaaaaactcccgacagccgatgccgccgggagtttttacagagcgtcttaagaaggaatcttctttagaaacagaggccttccttggcgttggcccgcatgaagtcgcggttgaggcgggcgatgttgtccacgctgatgcctttcgggcaggcggcttcacattcatactggttcgtgcagttgccaaagccttccgcttccatctgcttcatcatggccaggacgcgcttggaacgttccggctggccctgcggcagcagattgagatgggcgatcttggcggaggtgaacagcatggcggaggcgtttttacaggaggccacgcaggcgccgcagccgatgcaggcggccgcgtcaaaggcggcgtccgctttcactttttccacggcgatgttgttggcgttcggcgcggaaccggtacgcacgtcaatatagcctccagcggcgatgatgcggtccagggcggagcggtccaccatcaggtcccgcaggattgggaaagccttcgcgcggaagggttcaatccagacggtatcgccatccttgaacttgcgcatgtgaagctggcaagtggtcacctggcgttccggcccgtggggaatgccgttgatggtcagggagcacatgccgcagatgccttcccggcagtcgtggtcaaaatggatgggttccttgccttccttgaccaggccttcattgacgatgtccagcatttccaggaaggaggcgtccaccggaatgtccttggcggcataggtctcaatgcggcccttggcttcccggttttcctggcgccagaccttgagagtgagattgagtgttttagccatgttataatctttcttttgagtgttaatgtattggctatctttacttgtagctgcggatggcaaggtgcacgttctcgaaggtcagcggttccttgtggagaacaggcaggctgtccacgccagtgtattcccaggcggctacataggcgtattcatcgtcgttgcgcttagcttcgccgtccggcagctggtattccacgcggaagtgggcgccgcaggattcctggcggttcagggcgtcatagcagagcagctgggcgaattccaggaagtcggccacgcggcaggctttttccagttccgcgttgatgccgtccgccgtgccggttacgcgcacgttttcccagaattccttgcggagctggggaatgcgttcaatggcgtgggtcaggctttcttccgtgcgggccatgccgcagtcttcccacataatgaggcccagttcccggtggaaggagtccaccgtcttggtgcccttcacattcaggagcttgttgatgcgttccttcacttcgtcttccgcagccttgaattccggggcggcggtggtgacggcgccgggtttggtggtcgtcaggtaagcgggcagcgtggcgggaatgacgaagtagccgtcagacaggccctgcatcagggcggaggctcccaggcggttggcgccgtggtcggagaagttggcttcaccaaggacgtgcagccccttcacattggacatgaggttgtagtccacccacaggccacccatggtgtagtgggaggcggggtagatcatcatgggcgtttcatgggggtcgtcgtccgtgatttcttcgtacatgtcaaacagattgccgtattggccgtcaatccattcgcggcccatgcgcttgatttcatccgcaaaatccaggaagacgcccttgccggtgacggccacgccgcggccgtcgtcgcaggcttccttggcggcgcgggaggaaatgtcgcgcggagccaggttgccgaaggagggatacttgcgttccaggtagtagtcccgttcttcttcgggaacatcggaaggcttgatttcctttttacggattttttctgcggtttcacgggacttgggcacccagatgcggccactgttgcggagggattccgacatcagcgtcagtttggactgatagtcgcccttgaccggaatgcaggtggggtggatttgcgtgaagcaggggttggcgaagaaggcaccgcgcttgtaggccttgtaggcggcagtgacgttgcagcccatcgcgttggtggacaggaagaacacgttgccgtagccgcccgtgcagagcaggacggtatcccctgcgtaggatttgatttcgccggtaaccagattgcgggtgacgatgcccttggcttcgccgtccaccagcaccagatccatcatttcatggcgggagaacatttcaatgtgtcccttggccacttccttttccagggcctggtaggcacccagcagtagctgctggcccgtctgtccgcgtgcgtagaaggttcgcttgagctgggcgccgccgaaggagcggttgtccagcaggccgccgtattcacggccgaagggaacgccctgggccacacactggtcaatgatgttggaggagacttccgccagacggtagacattggcttcacgggcgcggaagtcgccgcctttaacggtgtcgtaaaacaggcggtaaacagagtcgccgtcgttctggtagttcttggctgcgttaatgccgccctgggccgcaatggagtgggcgcggcgggggctgtcctggtagcagaagcatttgacgttgtagccaagttcggcaagcgtggcagcagcggaggcgccagccaggccggaacctaccacaagcaccgtgtacttgcgcttgttgttcggattgatcagtttggactcaagcttgtacttggaccatttgtcctgaatagggccggagggaattttggcatccggcatccagtcgcttacgggaaaattaatcatgactttgagaggagttgatggttatttgatgatacccagaagaaccgagaccggcacggagatgaagcccaggcagataatcgcgccgtaggcgatggcgataaagttgtagaagggccggattttgcgggaatcgacgcccacagtctggaagatggactgtaccccgtggcgcagatggctgaacagcatcagaacggccaggatgtagaaggcggagcaccatacgttggaaaatccggtcacgatcatcttgtacacgtcaaaggtttccaccgtaccgtcggaaatgaaggtggtgaactgggcggggtcgtatcctacgcgcagggtgtactggtacaggtggtagatcaggaacaccaggacggtcagaccggtatagatcatgtagcgggaggagagcgttgccttgatggtgttcttgaacacgtagggttcgcgggccgcatggttttccagcttcagctggatggtcagccagacgtggatgatgaagagcaccgcaagccccgcgcggattccccagagggctgcttccggcatggagtgcaggccgtgggcgtaggtgttgatccattcagggcctccgaagatgagaaggttgcctgccaggtgtcccgcaaggaacaagaccaaacataaccccgtcagagccacaatgattttgcggccgatggaggatgtcacgaatgtacatatggtttttactagtgcattcataggcgctctaatgaaataaatgcgtcttcataggatgcccggttcaagcccggatggcaagcctcttcttgaatttccggcgcttttcggatttttgaaaagccggggaaagaggttgctgtttatcagtttggaatggttatcattttgttgcctgttccggcttgacgaggctttccgcataggcgtatcgtctgtgcatgaaaagaagtaaaaaggaagtgctggacgcggatttcgcagcggcgcgcgtggctgttctggatgtggccgcatttctggaccgggtggaccgcggggaaggggaggcggatttccgttaccatgccctgatggatgttcttcccctcttatccgcatccggccccggacgcgtccgggccattctggaagccctttcctacagggatgacaccgtgccggaaaccgccacagccaaagcggcctgcggagccccgaacctcagcaaataagaatgatggctttcatagaacctcatatacatatggtgtgccgcaccacggacgaataccgggccatggcgcaggccggctgcctggcggtaggggaaccggcgttctgggccggttacgaccgttcgtccgcggacggtttccgggattatttcgtacagcttacggaatgcgaacccgccagggcggtcaagttcggcatggaccattacacatggctgtgcatcaatcccaaggaggcgcaggacgtggctttcgcgcgggatgtaatgaaactgattccggagttcatcgaccggcccaatgtcctcggcattggggaaataggactgaaccggaatacttcccatgaaatgactatttttgaggagcatctggatctggcggtgcgcctcaaccagcttgtgctgattcacactccccatctggaagacaagcttaaggggaccgtaatgattctttccgccctgaaaaaccgtccggatctggacccttgccgcgtgctggtggatcactgtgaggaacataccttcccgctggtgaaggaggccggttactgggccgggctgaccctttatcccaccagcaagctgaatcccaagcgggcggcggatattctggaattgtacggaatggaccgtgtctgggccaattccgcggcggactggggggattccgatcccctggcgctgacggccctggcctgcgagctgcgcaggcgcggtttttcccggcaggaaacggaacgtcttctcctggaaaatccggagacattcatgggacagtccccgaagttccggaaagtgtcatcccgctaattccgcccgtggcgcggcggagggtacggccctctagtccccgtccgggaaaaagacggtgaggacggcgcccaggatgaccgccgcgtcatccagaaggcccagcctgccgattccgtcaaacaggaattcgtcgggagtcaggatgtaggcgcaagcggcggccagaaggcatatattccgtttgttgaaaaaacgcggttctccttttctgcttttgaaataccggaacaggcgcagtagcagctgctgtttttgaaggttcatggacgggaacgggggataaaggttcaagctcagccattttcccactccttttccctgtttcggggaaggagtctgttgccgacggacggaaaccgcagcgatccggaccgtgcggggaaatggattgctgaaaggatgggctgttccggatgctgagggaagccgggctttgcatgctccggttccggctgtcccggcatgggaaaaaggggcgtgtacggaagtggggcggggccggaagctcttgaaatgaccctcccgggggagcctgaatgccatttccccgtcaagtgctggccgtgagggtaccgcagcaaatggaagcttcttcccccctgttttttccggcagatgtttgaacggataaggaaaaagctggctcacgattttgtgagcaagcctttgaatatagggaggcggacggtacaggcttatgccctgcggcggcgcatcatcagcgcggccagtcccagcaggcccagggaagccgtggcgggttccgggatgctggcgatttcactcatcagttgaccaacttgttcctgggaaaggagggagtcgtgaatgtagagctgttcgatggattcagccagtcctgcgtccatgagaatctgatcaatttgctggttgccgaatttcaggccgctgttggaatagtacgtagcgctgtctccaaaatagatgcgggtgccaagatctccggtgactacggaaatggtcagggaaccttccgtgcccagcggggtgtcaacgacgggcccgttgtatgaggtgttgttccataatccctggagtttccggtccgtgttcaggcccacgccccagcttacactgctgtttttggcgttaaacagagcggtataggtctccggagtgttgattttggacaggtcaagaaccatcgtcacagacataacgtcgcggttgttggcaccgtatccgttgaagattatcccggacaacgtcagattgctgtcgtcagacgtgatggaaacggaatctttccgggtgccgaaatccgccgtttgggaggcaaagtccgaatatcccacgatggagctatccaacagagcggtagccgcggtagcgcttaggctcatgccagccgaaagaatcagggtggataataatttattcatggtcagtatcttaataaaatgattcaaggttcaatgtatgtacttgtgcttgaataacgaatttgaattccccaatcggatttggaatccgtcaagtaatgaaaaagaggccaaatcaatcatgaaaccaatgaataacaaagactgacccgtcatcttagcaaaaggaccagagatattaaaaaatcattattttcaacgaattataaatacaatatactaactcttaatatttttaattgcttgcggattccaaattcgctacaagttgccatccaaaaggaataataaatatgaagaaaacactgacatttttaatcgcgatgggaagctttgctgtttcctcggaggcagcgaccgtttttaattattacactcccggtacggataattacaatagtaccatccatgggttttatcttggcctggggtcttcttccctggctccttccgattcctcttctccctcctccctgtccggagagatcagactggacagttttacgctgcgcggagccgccaacaatttgggcgctaatgtcacttacggcttcctggtgctgaatggctccgacaattcggtcatcggctggagcaccaatacgggaactactgcagcagggattaatctgacgttcagtttttcttccctggatggttctcccctgcttcttgacgcggcattgacataccgtttcctggccgtgagccagtccgtgatggacttgatgcaggatacgtctaaaacgtatttatatgctgcggggggaacagccgcccctactgctaacacggaaggagataccgtaacgatcagcggcggattgactgctcccggcatccgcggccattatgacgccgagggagcgcctggtgattctgtcgttattacgggagccaacggaaccaatactttcagcttattatccccgattttcacggaaatccgaggggaaatggtgccggaaccagccacggtttccctgggcctgctgggactggccgcgctgatgatgcgccgccgcagggcttgagcttcctgatggcgaaaaatcggcggatgagagctgttcttgcggaacagctcttgttttttatatccagagaggaagaattgcttatccgtatgcgggattcatgccctccggaaggtacggaatttccgggggcagggggccgtatccagttttttcggcatggcggcaatttgctggaaacgtttttgagacgcagtaccggaaagctttttctttaccggaaaatgccgtcaaattcggcagcgcgcttttcgtccatatggtacacggcagctttcacatagtggcctttcaggccggatagggaacccctttgcagctcacagacctggagggccgccgcatacatattattcgccgttctattccccggcgctggtatttcggaagaacggcaatgggccccatgcccagcacttcatattcttttccatcgtctgccctgatgacggacgttgcatcaacgatgtttcccgacgatgcggctgccgtggacggcgactgcatccagctccgggatgaaggacggactgacgcgcatgatatggagcaggtaatgttcatggcagccggggacgaaatagttccagaacgcttctctcgtgacatgttccgtttcggcatggtctgaggattgttccgttcttaatgcaatggtcatgaaaggttgttctttacggctcccccttggagaaaattcagaggcggtgcatcgtcataatgtccggaatgttcatggggcgcaccacgcggaacccgatcatgcctccgtccgtcaggtaccagatgcttttagggttttgaggatcctgacggttccaggcgggggtgctggcgcggcgcgcagcgcttctcaggctgtccgggtcgtcttcccacgaaccgccgcgaacgatgtgaggggcgccggggatgatgaccaaggggtctttcgcgggcaagccgctccgtttgccgtaggcatccggaacgtaagagtccaaaacccattccgccacatttccgtgcatgtcccggagtccccacttatttggttttttagagcctgttttctggtagcggtcattggagttgttccagtaccaggcgtactggtccagagaggcttccccgtttccgtaagaataggcgccgggggagccggcccggcaggcgtattcccattccgcctccgtgggcaggcggtagtaatgcccggtctgggcgctcagccattcgcagaatttgctggcggcgtggtgggacatggagatggcgggcagaccgtgttcatagccgtggcccatgcccaggttcatggcggtgtagggggcggtaggctgcgtaacggagtcccacagttcgtcatccggctgttcctccagaagctggccgtccttggcgcgcggacgcccgttttccatgaaggccgtataaagttcccaggggatttccgtttccgagatccagaagggggagatgctcactttatgctgcggaccttcgtccggtttccggtgcggctcttccgcgggactccccatgaggaacgttcctcccggtatggcgaccatgcgcagggaagctcccgccacgggaaccgtttccgtgtaggattcaaaacgtgccggatttccggaagcttcaatgagctgatggatttggcgcgttgtgccgaccagctcccgggacggcaggtcatccggaatgggaagggcaggaccggcagcgcggtccagttcccgtttttgcagcgcggatcggctttctccccactggcgtgcgctggtaatgcgcgcggcatcttccgtggccgggcggggggaattattttcttcccggcacccggccagcagggcgcttcctcccagaaagcaggaaacaaggaaaatgccgcgcatggaatggagaaaaccggaatgccctacatcgtcatgcctccgtcgcaggcaatgacctgcccggtgatgtaacgggcatcgtcagaggcaaggaaggccgtcagggcggcgatatcttccacggaaccttgttctttcaaaggtattttcttaacgatttcttccttgagattgtcgggaatggcattggacatttccgtggagatgaagccgggagcaatggcgttgcacgtgactttgcgcggagcgaattcctgagccagtgatttggtgaaaccgatgaggcccgccttggaagcggcgtaattggcctggccgatgttgccgacgagaccgatgacggagctcatgttgatgatgcgcccggccggggatttcatgagaacgcgctggagggccttgaccgtattgaacgcgcttttcaggttggtgtccagaacagcatcccagtcttcctctttcatgcggagcatcagggagtcccgcgtgatgccggcgttgttcaccaggatgtcaatctgcgggaagtctttcaaaatggcggccatggtttcctgaacggccgcgtaatccgctacgtcgcaggggtaggccttgcaggaatccggaaattccttgttgatttcttctgcggcccccccgcagctggatggactgcggctgatcaggatgaccctggctccttccgaagcgaagcggcgcgcgacggcattgccgattccgcggcccgcgccggtaacgatggctgttttacctgctaacttttgcatgctgcccacagtaaacccgtttttcacggttccggcaagcttgaaatggacttggccgcgcaggaacccatacggggaaggggcgtgccgggaatgaaaaaaaggggggggagaaacggggcggggggctactgtccggcctcttcattttcccggagtgcatcggggggcgtcccgtcttcatccggttctaccaggtcgctgaattcatccgaattttccaaaatgtcctttaaggcggcggaaccgtaatagcgggcctcaaacaggcgtttgccttcctgcctgcagcggttgtccagcatttccattcgtttttccattttttctatcaaggcgtcttctttctccttttccgcatcgttcaatttatcctgaagctggaggaaatgccggatgtccttctgaatgtcctgcagcgttttgacggcgttgtccgcgctttccttgtcctgaacgcctgccaacgtctgctggatattgatggcaaaggaaaaggcctggttgatcagggattccgcggaaggaattttttccgccggagccgctgctgcgggggaagccgttccggcggccgtttcaccaaatgcaagagaggctccggacagaagcgcagaatataagagaggaacaagaaaagccttcatcctgttcttttaaggcaggatgaaatccacggcaaggaaaaaggggaaactgaaaaaagagccttattccgccgtgatgccgcctttttcatcgtccagaatgcctgacttttccagatagtagtcatatccacctgcgtaggcggtgatggtccccctgttcacatgcagggttttttgtgccagggaacggatgaagtgcacatcgtgggagatgaagaccagtgttccttcataatgcttcagagcctgcaccagggcttctacggacaaaaggtccaggtgggtggtcggctcgtccatcagcaggaggttgggcggatccaccaggaatttgaccaggctgagccgcgatttttccccgccggaaagaacgctgacgcgtttttccacatccagcctccggaacaggaaggaacccaggatggaacgcgcttcttcctcccggatttcagcgctgcatttcatgatttcctccagcacggtattttccggattcaggttttccgttcgcgcctgggagaagtagccgatgcgcgtcgtggtaccgggagtgcgttgtccggagtcaatggggatgatgcccgccaggattttgagaagagtggatttgcccgcgccgttcgggcctacaagaacagtgcgctccccgcgttccaccagcaggtccaggttttcataaaccctgcggtcgccataggattggcagactttttccagctcaatgactttctgggtgctgcgcggaggctgggggaagttgaatttaaatactttcctgcgggctaccggtttttgaatgattttcatcttttccagctgcttgatgcggctctggacttgcccggctttggaattgatggagcggaaacggtcaataaattcctgaatgtgcgctatttccttctgctggttgcggtaggccgcctgaagctgctcgaagcgcacgtccttttgttggaggaagtccgagtaattgccgcggtattccaccagttcttcgttgtcgatgtcgtacacgctttccaccagctcatccatgaaatcccggtcgtgggaaatcatcaggatggctccggggtagtttttcaggtatcgctggagccacagcagggacaggaggtccaggtggttggtaggttcgtccagcatcaggaggtccggctccaggacaaggagcttggccaggtacgcgcgcatgatccagccgccggacatttcccgggcggggcgatggaagtcgctttcccgaaaggccagccctttgagaattttcttggctttgggctccagctggtaaccgttggcggcgttgaaagtgtcaatggcttccgcgtattccggcgtatccgttttgttggcgttttccgccgtccggatggtgtggatggcctgttccatttccggcgtgatgcccagggcgatttccagaacggtttcatccttcggttcgctggcttcctggggaagatagcccacgatggcgtattcatccatgctgatggagccttcgtccggcgtgtcttctcccagaatcatgcggaacagggtggatttgcctgctccgttggggccaaccagagccacccgttccccccagttaatggtcatttccgtttccctgaacaaggtccgtccggcgtgggattttgtgagatttttgatcgtcagcatggtgaagagaggatgtattctaccgggatggaaaggggaaggcaagagccgtcagggcggaggcaggcatttttgaaagctttactggatttttacgcgtagtctgctagccttggcgcgccatgccgaccacgcagacattcaggcttttgcttgctgccgcccttttgtgcggatggagttcctgctgtactcctccggcggaggattatatacaacaaccttacgtgcagcagcaaatgtccgggctggctaatgccttcctggcgctgctgccgccggatcaggcctctcttcccgctgccggagcggaggccaggtggctggcggacacggccgtggtccagtccgcagcgattgcccgggacaacaggactgtgctgtttggctggctgaacaatattctggtcaattccaacctgcgcgacagggggctgtgctggcaggtccagcaggatttgtaccgggacctgcgccgccgccccgtgaagtatttccgcatagggctgacgattcgagaccgtggaacgggcagggagcacagttgcgtgtatgtcaatgccgcggggaagggattgcagggctccattgttctggatgcctggaagaactgcgggcatctggtgacgctgacccagaaggaccgggaaggcggcaaatgggaggaggactggcgggaaccatttgtttccaaggcctttccggagggccattcctacggcatggaacatcacctggtctggcccgggtgggccaggaaacgccccatgctggttcagcggatattccagtccgatcagcagaatgaggcgaaggcggccgctgaataaaggggaagcctgatccggcaggaaccggcacacggtgctgcgccgcggcggtttgcggtatccgccgtttttaaggaaaatcccggcgaatcggcaaatggcggagggaatccggactcagggcaaataaaaacgcactcagtgcgtacaccgagtgcggattaattggataatttgctagtgttgcagggcaaaaccccgctgcaaacttacttgcccttggcctgcacaaccggagcgggagcaggagcggtggtttgctgttgctgctgctgctgggagcaagaagcgaccaggcaagcggcgctggcgatggcgaggatagcgatgttcttcataattcgaattaaatacagtgtttgttaactactggaacctccgcatccacggaggtttgctggcaccaatgtaaatggtggcaagtagaaatcaagagattttcttgttccatgtcacggcattacagaaaagagcaggacccccggtttctgaagtcctgctctttttgatgcgttatggaaaacggattgtttcaaaaccgttttttgcgcttacaggctgctcccaagctcaatgatggagtagtccccgtccggcctccggtacacgatctggagcacgtctcgccgcgcattcctatagagtacgaatggcttatcggaaagttccagttccatgatggcttcttccttgtaaagctttttgagattgtagctttctctgtgaatgagcaggggttccgggtcttccggggaatctcctgggtaatccagcacggaatcgtcatataccgtttcatccagcttgcggatggtttcctggtgatggggacggaaattcttcatcaggcgcgttttgtgcttgcgcatgcggcgcatgattttggtgatcgtttcatcaatgcaggcgtacatgtccgtcccttccgtggacgcgtcaatggtgatatgatccgagcagaacaggattacctgggaaatcttgcggtcgcgttgcacatcaagcagtactttaacctccataatgcgcgggaaatccaagcggatcccctcaatttttttcgttacgaattcccgaatcgcgtctgtgacttccacgtggcgccccgtgatcgtaatgggtgtgtttacgtttaccttttgcattgtcgtacctctttctagttgatgttaatgcgcggaccccgtccgcacctttcaagatatacagatttgacaatgtttgtcgaggaatcctttctttttttcgcgtgcggggaaaggcacttttctgtttccgtttccatatgccggacctgggcggctctcctacctgttgtgagccaatcaatcggggagcggccgtttccgtttatcgctttccgtcgtcttcggaatacgtttgaacgtctttgtcatacaattgcgggtataaaaaaattatttgaaagtacttgacatgctgcggaaatgccttataacagttgtgcactcctctacagatgctctctaaatcgcgggatggagcagccaggtagctcgtcaggctcataacctgaaggtcgcaggttcaaatcctgctcccgtaaccatttgaaaaccctgcaagttcattgcttgcagggttttttcgttacggatggaaaagcatccggcgagtattgggagtctgttgtttctgggcgcctttttttgacttttcaagctgccgggttatgttaggctgattcgcaatatcttgatacaacatggaattgctcatcattgcctgtttgattttactgaacggcattcttgccatgtctgaacttgccgtcgtttcttctaaaaaaatcaggctcgaagccgaggcgcaacaaggcaacaggctggccgcagccgctttgaagctggttgaccagccggagaggtttttgtctacaatccaggtaggcattactttgatcggtattttgaccggcctgttttccgcggacgtcttgtcagatgatctgggaggttttttctccgggttgggaatgcctgaattttatgccttttatttagcccgtattctggttgtggctgtggtgacttatttgactattgtattcggggaactggtgcccaagagaattggaatgtgtgccccggaagtgatttccaaactggcggccgtgccgatgaaagccttttcttgtgtcgcagcccccttcgtatgggtgctttccaaaagcacagttctcgtatgcaatttgttgggcgtcaggaagatgactgccaaggtgacggaagaggaaatccgcctgatggtccaggaaagcgcccgggacggggatgtgcaggatgtggaacgcaagatcgtggaacgtgtatttaatcttggtgaccgggatttggaatccatcatgactccgcggggggatattgcatggctggatgtcaagatgacgggggaggaaatcgccgcagtcgtgaaccgtttgccttatcataagtatcctgtggctgacggttccctggaccatgtgcagggctttgtttatataagggagttactcggccgtcttcatgacgggcattttacggtgacgcgtttcatgcatgagccggttttctttccggaaacgatgaaagtttacaacgccctggacgaaatgaagaggaggcatctgcagtttggttttgtctgtgacgaattcggcgatgtgaaaggcattgtttccctgcgcgatattctggaagctcttgtggggacgattcaggagccttatgaagagtctgaaatcgtcgttcgggaagatggctcccgtctggtagacggccagtgttcattttacgattttctcgtccattttcaggaagatatgctgtattccaagtatgattacaatacggtcagcgggttaatcctggagaatctggggcatattcctttgaccggggaacgcatggcatgggaaggatttgtgtttgaaatcgtcgatatggatggagccaggattgataagatactggtcacccgtcattccttgtcccggcaccggaatcccggggcggagggaagtctggaggccttgtgacttgttttcccgttttcctgtcctgaagggagcggtattttttgtggaattagagtgggaaacggaaaattttccggttggagaggcgatgacgaaacagccgtgcgagaggttcgttatccgttttagtccttattataaacggataacatgagaaacgtcgccagcaatgtggctgatcgttttttcatgttgttttgttgggatgatctacggtgtttcccttttgatgctgcgttgatttcagtaagcttcattttgtgctttgcctgccgttttcgattgtctgagaggttttctcttttgaatcatgcagtttcaacggaccgtagaaataggaggcggtggctcccccgtcaatcaggaagtccgcgccggtgatgaaagcccccttgccgcccatcagcaattccgctacatgggctatttcatccgccgtaccgggtcttcctgcagggcacttcgcaaacatgtttctgtaaaaatcacctctgggaccgttgaattcatcgattgccagaggggtgactataatgcccggggaaatggagttgatgcgtgcgcctttggcaccccatttgacggcttccgccatgacacgcttgacgttgcagcgtttcgccatctggtaggcatgcagagtgtccttgatattcccgggttggaggagttcgaggttcagcaattcctctgttggagtcatggccagttgttcgtcctgttcggcagtcagagcgggcatgcggtgaccggattggctggagatagttactcccgagccgccggggcaaataactttccccacctcttccagcaatacggcggttccgtagagatccactttaagaatggtttcaacggatgcctggctgggggaaacccccgctgcattgacgagcatggaaatattgccgtacctctgtgcttctgcaatcaaatgcaggatggagtcccgggaagagagatccatctctaaggggatggtgtcaaatccggcctgattcatcgtccgggcaatggcatgcgcgttcccgatatttttgtcgccaatgacgattttcatgccgcttcctattctgcgggcaatggctatgccgatttgcccggctcccgtcaatatcatgacttttttggatagacgttgttccatgggctatgaaattagttgaaatgaccggtttttattcctagccatatgttatgttcctctagccggacggtatggccctcccgcaaaaagggcaatgcaaaaacggccataggtgatggtattgcaaaatgggtcatatggattggaaaactgagggggggatgaaagaacccaggcaaaagtcatggcagcatgccgattcttttcagccatgttttgacgcctgcggcattgcccggcatgtcaatcccctcatcatcggcacgtccgggagttgtaatatctcctgggtcaaggtcttctggaagagttgacggaatgtgccgggaatggggcgtaagtctgtaaatttgttgcatggattcgtttaaataagtagtcgcgtcataagtaaagaagggaatgagcgttttccctttcaggtcaaatgcctctaaaaaggtgcaaatcaccatggcaggctgatgccaccagattggagagccgacgaagatagtatcatatttcgccatcagggaggcttcaggcaagttagcgacctttgggcgcaggttttcataagcttcttttttgacacggtcgctgtcgcggtaagggtcggcattgtaggcctcggcggcttcaatccggtagagatccgctccggtcagtttcgcaatttgttccgccaccgctttggtattgcccgttgcggagaaataaacaaccagcggttttcccgcatcttgtccggttctgcggacaacaggcagcccttttgcctgcaacagcgtgttcagctctttccggactgagtctgcctccccggggccgatgttccgggacacaatatcaagcaactggtgcagctgtgcgggtgttatgcccagattcaggcagatgcccatgtgagagcgggccattggttccacaccgcctatgaccgcgaggatggatacggtagccaattcgcgttcatcataggtcagaacgtcccgttcaaaaatatctgcaaaaaggtgttctttcaggaaacgttccatgaccggggcaaattcggcataggcagctttcggcgcattgacgggaatgccggagatttccgcaagaatggcgcacccgcgatcgtagcggctgcgcttgtcctttgtggggcaagcatcttgtcccggggcatcggctatgcctcgggactttcttttatccagcacggagatgaatgtctgcaatcccctcaggcttcgtggaaacccgcaataggcgtaggaatgcactaaaatttcccggatttcatttatcgtcaatccactgtccaaggcggcattcagggcaggctgcagctgattcaaatcccctctgccggtataggcggcaatcgcgatgatgtgtttctacctggaggtcaattcctgacaggaaggggcggaatttgccgccggagccagcacgcacgacatcaggcagaacaggacagacgataaaagtttcatgaacctgggagagcagttttacaggttgttcccgaagaattccgccagttttccgacagcctgatccacgtattccggcacgtagtaagtcttgatatgcgtggctcccggaatgaggaacaattccttgttgagggttcccgtggcgcggctgtagcattgttccgtcatgtagaaggtgtcggctctgctgcccgccatcatcagcaggggctggttaatcaggtgcataccttcgctcgcgtcaaaggcaaagaggtccatcaggctgcttttggtatagcggaaggtggaattggggtgggcgtggctttgcagataatagtcgtagccgtcccggtagaggtcaaagggcagttgggccgcctgttccggcgttactcctttcatgtctcccacgtattccggctgaccgccttccgcttcgcgctggcgggcggcgcaggcgtcggcaaggcgttcctgcacgctgttgatctgcgagtcgagaaacccgttgcgccggaccaggccggtgttgaacatgctgagcgtggcgactgccttgaaacgtttgtccgtctgtgcggttttcagggtgtagcctccgccgccgcaaatgcccaggatgcccagacgggaggcgtccactccgggatattgcagcaggatgtccgcggcgcggcggatgtcttccatgcggttggcgggtttgtccgtattgcggggagtccctccgctggctccctggtaggccgcgtcaaatgccaggcagatgtagccctgttccgccatgcgctggctgtaaagtccggccacctgctccttcacgccgccgttgggatgcgccacgacaagggcggggtattttttcgaggcatcatatccggcgggcgtataaacatgggcggcaatttgcagtccgttcagcgtataggcgattggatggatgttgacgcggccttccatgttttccgtgacggctccccggtaaaccagcccccagggattggcgttgtggcttttaatgctttttgcttccgtaaatggggtttggcgggctggggctgttgaaacgaccggagaatcatttgtgttcatttgctgcgcatttaactggtggttgaaggaaatcagggaaagggctattgaaataatggcgtttgttttcatggcatgtactttgcttcctcaaacagttcccattctatcatgaaaggctctcttcccgtcgatagacggattacaggttttgctaccatgattacagatggcggacgcagaaagtaaatgtgcgggggagtgtgcctgtcacctgtcaagtttgttctgccggagccaggcggccatatggtcggcaatgatgttattgtttttatcggacatcagaaaatgcgtatttccccggatgccgattttgggcagttccaccagagcagcatggccgccatgcctgttgacggcctccacaaatttgcgtcccatttgcagacgtacgcgccagttttcccctccaagcttatcggtgacgttttcaggaatataatctccgaagtagaggatgatggggatttgggtgagcttgttgaattcctccggcggaacggcgattcccttcatcgtgccggtgaggctgggcatgtcttcgggaacctccccttccgggaagacgtaggtgcccggttccagggaaatgatgccgcgcacttccgggctgcggatggccgtcagccagccggggaatccccctgcggagtgagtgaccaggatgcccttgcccacgcgcttgaagagggcgctcagggcatcgagttcttttgtcatatcgtgcgtgccgatatcgggtgtcatttgtcggaaaaactggtccagggaatccttgtccgtagggaactgtactcccgggttgaatgcgggccattcgccgatccggaagatgtcgaaccagaactgctcgtcggcaagcggcctgatggcggtttccgccgtcgttctgcccgcccggccccgtcctgggaggtcaaccaggtaggtggcgtatcttttgcgcaggaacatgtcattaaagccctcccgtccgtccggtgttgtctgccagcaccgggcggactgtccatagccatgaatgaagattagaggaagcatgcgggcatcggccggtatctggaagtccacggcggcgtggtcggcatggtaactctggccggcttcaactgcttgcccccagccgggaaaacggctgttgtcatatgttcccgggcgttgcagaatgttcccgcccacggcaaaactgccctgccttgcaataagcaggggggcttgttccgcagctggaacaggggggatgcctcccgcctgaatcatggccggaggcgtgaatatcgataagaaaaaggcagggaggattaaccgtttttttttcatcatttcatgaaggagactgagttgtcatgcttttgcaagggaggaaaagcgtgatttgttgattaatgggttgatgatttttctgtgatggggcttcctccaaacacgtcggacatgttcatgaaggagagagctgcgtcgatctgccggacttcatccgcggatagtattacatgggctgcctctgcgttttctttcagtctggagaactttcgtgtccccggaatgggaacgatccagggctttttgcagagcatccacgccagggaaatttgtgccggagtggcctgtttttcttccgccagattgcggagcaggaggaagagatccttgttggcgtcaaagctttccggtctgaactgaggcatggagctgcggtagtccgtccccggctcaaacgtggaatttaggttgtagcggccggagagcaggccgttggccaggggggagaacgctacaaagccgatgcccagttcttccagtacgggaaaaagggattcatgatagcgcgccatcatggaataacggttctggatggcggtgagcggacatgttacgtgcgcgcgccgtatggcttcctccgttgcttcggaaataccccaatgcgcgattttgccttcacggatcaactcctgcatgacgcccgccacttcctccggcggtacggaatcatccatgcggtgctggtaatacaggccgatgcgttctattcccagccttttaagggaactttccacggattggcggattgtgccggggcgggaatcggtgatcagcgggtatggtccggggactgccgtgccgctgaaacggattccgaatttggtcgcaataacgatcctgtcccggtagggcgccagcgctttccccagcagttcttcgttgtcgtgggggtgtccgggcgttccgtacacttccgccgtatcaaagaatgtatatcccatatccacggcccgggacaggagttccgccatttcctttttgtctgcgggcgctccgtaggcatggctcattcccatgcagcccaggcctatggctgaaaccttcaggccgcttttgcccagctccctgcatggcatgttttgcccgttaattgttttcatgcctgcaagactaccataagatttctattttttccgatagacggattacaggttttgctaccatgattacaggttcccggaatgagctggatagctggctcccttcctgctatgctccggtcaaaagcagagaaagggcatgggcattattctgaacatggattccgtaggggactacaactcctttttggggcaggaaacgctgcaccctctggtcagcgtcgttgatttttccagggtcccgccgctgcggcatgtccgcaaggcttacgggttctatgccgttttcctgaaggacctgaaatgcggagacctgcggtacggaaggcattattatgattaccaggagggaactcttgtcttcgtatctcccggccaggtgctgggcaatgatgacaacggggaatatttccgggtagagggctatgccctcctgttccatcccgatttgctccgcggcacctccctgggacgcaggatgaaggactatacctttttttcctatgacgcttccgagtccctccatatgtcggagagggaaaggaatttattcttgaacggcctgacggagatccgggaggaactggaacggggcgttgaccggcataccaagtccatcgtgacggccaatatcgaagttctcctgaaccactgcatgcgtttttacgaccgccagttcattacccgcgagaatgtgaacagggatgtgctgacggagttcgaacgcctgctggattcctacttcgagggagacaagcctcaggaatggggtctgccctatgtgcagtatttcgcggatgaactgcatctctccgccaactatttcggtgatctcgtcaagaaagagacgggaaaaactccccaggagcatatccatatcaagctggtggacaaagccaaggagctcctttgcgccaccaataaatccgttagtgaaatcgcctatgaactggggttcaagtatccccatcacctgagccgcatgttcaagaagaatacgggatattccccgaacgagttcaggttgtcggcgtgacgcccgttccctgtcgccggacggcctgcggcattctgtccggagcggaacggttcgttccggattgattgccgggccgggaatacagaaaataatcttctgttccgaacggcaataaacaggaatgcatcttttttcagctgttctgttgtccgcggtattcctattggcgcatgcgggcagtttccggcgccgggggaatgtattgccggggggtacaataatggcttcagcctgccggattcatattacggttttctgccgtggagaagaaataacgtcatcctggaaaggcaaccttttatgaacaggtattttatgaacgtgtggagcgattgtgtgccattactgccgtctttggccttgttacggttgcggacaaagggtatggtgcggcaagataaccgcgatattggacggcatgatgaatgaaagcggtctgccgcccgccaggagacgaccgtttgcatccttcccgcaacgccgttccgctgaataatataaaacactacaataatgggaaactcaatagaccatggcatgttccggaagtccgtcctgctggctttcggattgtccatttccttctcgggcttcgcgcttgccgcatcggaagaaccggttccggagcaacaggcccaggccgttgaaggcgccagaaaaatcaatcctgccgccgtggaagtgttgcttgacaacaaccgccggatgacgctcgatttttacggagacaatgttttccggattttccgggatgacagaggcggtattatccgagatcccaaggcggaaccggaagcccgcattctggcggacagtccccggaggccggtttcccggctggatgtggaccagcagggcgatgcggttgtcatcactacggggaaggtcaggattgagataaataaaaagacctctcttttcaaggtgatcaatctgaaggatcattccgtggtggtggagcaggcgtcccccgtcctttttggaaagggcaaaaccagcttttccctgaaggcgaagccggacgaatatttttacggcggcggcgtacagaacggccgtttttcccacaagggaaaggtcatttccatagaaaaccagaacagctggacggatggcggagtggcttcccccactcccttttactggtccaccggcgggtacggcgtcatgtggcataccttcaagaaagggcagtatgatttcggctccagggaagagaatctggtgaacctctcgcatgatgaaaattatctggatgtctttttcatggtcagcgacgggccggtcagccttttgagggatttctaccagcttactggcgctcccgttctgctgcccaagttcgccttttaccagggccatctgaacgcctataaccgggattactggaaggaagatgaaaaaggcatcctgtttgaggacgggaaacggtacaaggaaagccagaaggataacggaggcattaaggaatcccttaacggggaattgaataattaccagttttccggccgcgccgtcgtggaccgttacaaggcccatgacatgccgctgggatggcttctgccgaacgacggctacggagccgggtacggccagacggataccctggacggcaatattgcgaatttgaagagcctggcggactacgccaggaaaaacggcgtggaaatcggtttgtggacccagtccgacctgcatcccaagccggaaatcagcgctttgctccagcgcgatatcgtgaaggaagtgcgggacgccggagtgcgcgtgctgaagacggacgtcgcctgggtaggcgcgggctattccttcggtctgaacggtattacggacgtagcccagatcatgacttactacgggaataacagccgcccgttcattatttccctggacggctgggccggaacccagcggtatgccggcatttggtcgggcgaccagacgggcggcgtctgggagtatatccgtttccatattcccacctacatcggctccggcctttccgggcagcccaatatctgttcggacatggacggcattttcggcggaaagaacccgttggtgaacgtccgcgatttccagtggaaaacgttcacccccatggaactgaacatggacggctggggagccaatgagaagtatccccatgccttcggggaaccttacacctccatcaaccgatggtacctcaagctcaagtcggaactgcttccgtacgcttacagcattgcggaggaatcagtttccggcctgcccatgatccgggccatgttcctggaatatcccaatccctacacgctggggaaagcgacgcagtaccagttcctctacggcccttacttcctggtggcgcccgtttaccaggaaaccagggcggataaggaggggaatgacgtccgccatggcatttacctgccggaagggcagtggattgattatttcaccggggatttgtatgagggcggcaagatttacaatgatgttgacgctcctttgtggaagctgcccgtgttcgttaaaaacggcgcgatcatccctatggcgaacccgagcaacaatgtctcggaaatcaatcccaatctgcgcatttacgaactttatccgcacggtagcacctcctttgccacgtatgacgacgatggcgtgacggaggaatacagaaccggcaggggcgtccgcactctggtggagtccagggtggacggcaaaaacaacgtgaccgtcactattcatccggcggtgggggatttcgacggtttccagaaaaagaaggtcacggaattccgcatcaatgtgacgcagaagccgtccggggtttccgccaaaatcggggaaaacagcatcaacctggcggaagcgaattccctggaggatttcaaatccagggagaatgtttatttttatgaccgggctcccaacctgaacaggttcgcaacgaaaggcagcgattttgaaaaaaaggtgatcgccgggaatccgcaattgctggtgaagctggccgcagcagatatcacggcggcccctacggtgctttccgtggaagggttccggtttgaaccggctgaaaagtaccgcctttcttctggagccctgaccgctcccgccaatgctgcggtgacggaggaaaacgcggcggcctataccctgaagcccacgtgggacgccgtcccgaacgccgatttttatgaaatcgagtttggaggaatgctgtacaccaccatcaagggaacggaattcctgtttgaggatttggaggccgagactccttattccttcaaggtgcgggccgccaaccgggacggccattccgcgtggacggccgtcagcgcgaagacgaaagccaatccgcttgagttcgccattccgggaatcgaaggtgaaacgagcgtggaaaaccagggcagctccctggcgaagctgtttgatttcaaggaaaaggatgtgtggcacacgaagcatgatgcgaaggctgttccgtttgacctggtcatggacctgaaaacgattaacaggcttgagaagtttcattacgttccccgcgaggacggcggcaacggaacgctgctgaaaggcgctgtttattacggcatggaccgggagaactggacgaaggcaggaacgttccagtgggataaaaatggagacgtgaagatattcggcttcaaggatgctcccacggcgcgctatatcaagcttcatgtcacggaaagcgcgggtgattacggctccggcagggaaatctacgttttcaaggttccgggtacggaaagctatttgccgggcgatatcaacaacgacggcaagattgaccggaatgacctgacttcctacatcaactatacgggcctgcggaaaggcgattccgactttgaaggctacatcagtaacggggacatcaacaagaatggccttattgacgcttacgatatttccgtggtagccacccagctggaagacgaagccgaccagccgcaggaagaagccgacaagaaagatgaggaagaggataaggcgggaggggacgacgagaagaaaaaatccgccgaggaggcaaagaagaaagtccgcgtggacggaacgcttttgcttagtgcggataagaaaaggtattccaggggagatgccgtcaaggtgtccgtgaagggccggaacctccggctggtgaatgccctgagcttcgctcttccgtatgaccccaaggatttggaattcgtgggcgtggaggtgaagaacatgaagaacatggagaacctgacgaacgacaggcttcatacgaacgggaccaaggccctgtaccccaccttcgtcaacatcggagacaaagagcctgtggaaggaacctccgaactgtttgtgctgaaattcaaggctcgtcgcgatatgaagttccagccgaagctcacggacggcatggtggtggataaaaagctgaacaccaaaaaattgtaatttaacatcctgatacggctccatgcccggccaaatggaggccgcgcatggagcctgccgttccggcggagtatttccgcagtattcatcgctgtggagcggtgttcttccgcgtgttttggagaatccggacggagcggcgacgcggaaatattttcctgcctcgcgtttccggcggagcgtgacgcaatggggctctcttaacaggcggatgaaccgtttttttctggcgcgaccggtcttttcccttatgttgggggcgccagacaggccccacgatgccatgaccggccccggactcatctccttgttctgctttttaatgacggccgcctattttttgcgcggcgggatgtgtgcgggcgccgttttgtgcatgggcctggcgtttttttcattttcccgtcgcggctggcttcgcaggagcgtcacgtctctgctgcaggcttccctgcttttctggggggcggaagcctggcgtctggccaggctgtggatgatggaaggggggcctttcctgctctggacttccattccggctgctgcgctgttgcttcatgcggcggccattctatggcggaggcgcggagaaaagaatttgcccgttccggagctggcccgcagccgcgtattttccgtttccgtattgcttctgtttttgctggatgcgctggttcctttccgtttgctgatgggggagcgcatcttgccgtggcagggggtcaatgggctggcgattcttctcctggcctggtggggcggctattgcgcggaaggtttgttgaatccgcagacgtctccacgcaggcggcaggtgatgtggaccgtgtttgcctccgctttttttctccagtttctgctgggagtgacggtggcttcctccctgctgatgacggggaagctccatattcccgtgccgtttatgatgatttccggcccggtttaccgggaagaagggtttttcatgctggcattgttcagcgtatccgtccttatggccgggagttcctggtgcagccatttgtgctacttcggggtgtgggactgcctggccgccgcttcttcccgcaggaaggggcatccggtgccgggtgggaaaaaagcctgtgactggaggtggttttcccttgccgcggcggtggggattcccctccttttgtccgtgtggggcgttccgctggggtatgccctggcggcggcgttcgccgtagctttcacggctccatttgcctggaagaaaagttccgaaaacggtgtgcgggaatattgcagcaggttctgccccatggggctgaccgccagtttgctgggcaggctgtccccgtggcgcatgcgcgtcagggagacatgcaccgggtgcatgcggtgcgcctccgcctgccgtgatctcgccatctcgcgcgggggcggggcctgccgcatttcccggcgctgcaccttgtgccgcgactgtatttcccggtgtccgcatggcgctttgagcctcggcatggccggccccttttcctctgtgccgtccgtgcggtcggatatgtattttgtaacgctggtttccgtcatgcatgtggtcttcctggccacggcccgaatctgattttatgttgccatgaaagatttctgctccctggagtatctgttttgcggaggatggatggcatctgtccattaggaggctttttcagggctgccgtcagagggattcaggcagcggtgcaggagggggacggccctgaattcatggaacggcatggttccctcttcccatccgaaagagtggattttggtttcagaaggtcatttttgttattcattgagagatttattgatgatttaaagtttttgttatgatttttgaatgaccgttcaatttattaaagtcactaaaaaagatagggtctgctatgctccggtgccggagccgttggaagagggggataagctggaaatcatggaaatgaaggatgaagcccttttcccgcaagcagggaaaaacgcaaggatttccctatccaggaatcccatggtattcgtgaaaatgaatgacggattccagcgcatcctgatgaagaatatcctgtatgtggaggcgggcggaagttattgcacgctgcacgtgcacggcatgccggctatcctggtatccgctccgctggcgcgggtatccgagcatctggatggggaatattttatccgcgtgcaccgttcctacctggttaacaagctgcatatagaatccattgcgggcaacttcctccaggtgggcgtcgttgccattcccatcagcaaattcatgaagaaaaaagtgctgggcagtttgaacatgctgtcgttttccaaataagttccggcctgccgcacgggctcctgcggcgttccgggaaagcgaaatggaacggccggaaaggcgggatggaagcagaaacggaatggccgcatcattcacgacgtcgccggaaggcggcatatcaatgaatctaaaccagaaatagaaattaaatatatggcaattgacagatcagcagcagaagcggcgacttcctccctgcagtcgctgcctttcggcaacatcatcggcggtcccctggtcgcctgtgtggaagcacaggcccaggcggcccggacttcctgggaattcatccagaacgtgggcctgtacgcggatggggaagagaagaagacggtgaacgtttccttccagttcatcaaggacggccgcatggctcagattacggttccccttctgaccatcgtccccattccctatatcgccattaactccatcgacatcaatttcaaggcgaatatcagcgcgtccgccgccagtacggagacggaaaattcctccagttccgtagataccagcgtttccgcctctgcaaggtgcttttgggcgcgcggcagcatgaatgccagctattccagcaaaaaggactcctctgcgaccagggattccaaatacagcgtggaatacaccatggacgtagctgtccatgccggacaggacagtatgcctgccgggatggccaaggtgctggagatgctgaacaatagcatttccgtcgtttctccggaagggttcctggacgtgcagcatgccatccaggacgacggaaccgtgaaattgataacctcctacaaaaacagggaggggctgtttgacccggaagccatcaccctgcggataggcgaagcgacggaaatatttgaaaacggtgcggggaatgaagccaggattgtgaaaacggattccggcaaggaatacacactttccagggaagacgccagaaactgcacggtgagtgctggagaactcaagaggaaggtggctgtaggcgcctgataaccgaaccatagcgatttctcctccattccagagccatgtcccgtcttaatctcatcgtggaatccctgctgaaggacattattgaagcgcagcatgcggcaaactgccacgcggcatcactggcgcgccagtatgggaagagaggccgtgcgtgcggtttcccgctgcccagcgcccagataggctccctggaattcgatttgaaatatgcggtgacgggaacttccggggtggaggagaaacaggttgcggacacggagcagtggagcctgttccggcaggaactgaaagagcgcgtgccggcgtttgtcatccgttccattgtgatggccgtggtgcattccagccttccggacgacgaagcgagaagcgacttctcaagcctgctggccagggaggaacagtggaaaaagaatttctgctcctacctagggaagaaaatttccgcagccgtttccgctcatgagggcgcgctcctgaaggcggaacccgggctggacaggggattgctgctggagcttctggcaggcgtcgcggaaagggaattcatggataatccggagctggaggacctgttcctgggaacccggggagaccccctcaggcaggaatgccgcgccaatctccgggaaggcctttcctctttcttggccgctctggcggaaaagtacgtcctcaccaggcaggaaagcagtgtggtggtggatgtggaagtagaggcggacaagctgaaaaagatgccggaggaagccgtgcagaccctgcgcctgaatatatcccctgcttccattccctccgttctggcggagcagaatgatgtttccgggttgtccgcgtaatagtgatagatgatgagtgattctacaaataataacaaggtgaacgggcacattatgagcctgcagcagctgatttcagcgccgctggtcgcaacgattgacgcggatgcgatgtccacggaacgctacatgaagcatttcatgtccctggcctttgagtcctacaatcctgtggacggttccaccggggcgttgaggttgatcagcttcaattttacggacagcgacgcttccggcggcgcggaaaagaaggtcagcgtgccgctcgtcagcctggtgacgctgccgctgctgcaaatcaaacaggcggattttgattttgacatcaatatcattgacgccgtagccgccgcgccgaatgaacatttttccctgaacaggggagaggtggagtcccccggcggaaaagagcgggatgaagggctgaattttcgggcttccctggctccgcagtccgggagaggggcttcttcctccctgcaggcgaacatgaaaatccatgtctccatgcagcagtctgacatgccttccggcctgtcccaatttctccagctggcttccaggccgcattatgaggatgtcccttcccgggaaaagaatgattaattgaaaaaaacgatatggaccagaaaacaacttattcctaccagcgtactccgggccttgactgccccaaatgcggggtgtatttccccacgaccattccggacttgctgtccggctccatcaggtgcccttattgcggcctgacgctttacattgaccggaaagaatcaggccatgccatgcaggccctggaaaatttccagaacgcattagacaagcagcttccctccgcctccctgtcatgaagaaaccgttgattatcctgtccgccgtgctgtgcatggttctgccgtccttgtctccggcggagatgcggcagcgggaaccccgccagcttgccgccgcctggcaggaagtaaagaagcagatagcagacgacgggaaaaccatccgtgtgagggacggcattcaagcgcttgaactcctggcggaactggggatctcttccgttccggcggacggcgtcaggctgtcccgcggcagtctgaccattgtggtcacgcgtgggaagaaagaggacgggattttttacgtgctggctgttaaggaagaagggggcgcaagcctggaagtgaagatggttcctccttcctgatttgccggagaggaaggtcattcattttcaaaatcccacacgcggcggcgggcgtttttcttcgtccgcccgccgttggctttccggaaggggtcaaaaagagagtccagcccgttccctttcagcagcaggcactgttccatcagacggcccagtttccctttcgggaaccctttggcctggaaccaggccagatattcctgggggacgtccatcagcggacatcccttgggcgggtatttggcaggaccgtacatgccgaaagggatatgggtctgcgcgatttcctccaccagttttctcaaatcttccgcatctggtatttcaggatcgttcataggttttgcagaataaatggttgcaggcattccgccagcctttccggcgtttccagggaaagccggtggccggcatgagggatgataacagcttgccctcctgccatgcgccgcgccagggcgctgaatctggcatcgcgctgtccggcaatccacagctggggaacaggggattgcttcaaaagcggggccaggttttcctgtgcgcccacggaccagtcaataaaggcgcgggagatggatttgcgccacggtttcagggaagaacggtccggaggcggcggactgccttcaaatacgccctgggcatcccattccttcaaaaaattttcccaggatgcggaaaggcattggacggcccattccgcatccttcgcccgccgcgccgcccgttcctcttcatgttccaggccgggattggcgctgacgaatatggctcctttccagagagggggatgggccaaaacggcctgcatggccaacctgccccccagggaatagccgcagatgaggggatgacgatcctgggaggctatttcggaacaaagcacgcgccccatatccttcaggcttttggggcagcattccagatacctccagaggttcagggcgcgagcctccactcctccggcacgaagaaaatccatgacgggtttccaatccgccggagaacccagattgccgtgcagaagccaaagcatggtcggaaccgtctttctatttgacgccgtagccggcgaggccgttcataaacatctggacggaaatcatgatgagcaccatgcccatcatccgttccaaggcgattgtccctttttctcccagcagacgcaggaacttctgggcgatgaaaagcaccattccggagaggaaccaggcggtcacgatggccccggcataggtcatctgggaaatgctgtccggagtctgggaggcgtgcagcataatgatggacagggaagaggggccggccatcaggggcatggcgatgggaacaatgaagggttcgtcttttccgtccgctcgtccggaagaagaaagcatatccttggcggggaagaccatgcccagcgctacgagaaacagcaggatgcctccggaaatgctcagggtggaaggttccagccccagcaggttcagcaggaattttccggaaaagaagaaaaggagcagcaggctcaacgcaaatacaagctcccgtgtcagaatagccttctgctgggcgggcgagtattttttcagcattccctggatcatgggcgccagacccaccgggtcgatgacgatgaacagaagaataacagtggaaaggaagtcctgcatgggatatgccccgttgtaaacgatacgggcgtgtacgtcaaagggaaccgccagcagtggaaattttctctgcccggattgctattttcttcaccagcgcaggagccgggcctttatgcctggaaagcgatttaaggaattctggggaaactttgcgtaggagaccatagctttttaataaaacagaaaagctattaaggcaaggctccttcgagagaccggctcgatgtttcaaaatctgctttccctacatactcccttcgaacaccggggttcgcaaatccatccttgaatctgacttcaagctcgtacctcttgttattgcgaaggtgctctaaatacgtcagcaacaaataagcttcctggatgggaacttcatgtttttctcccggctgcaacgtaatgaaacgtatggaaaacggtagacgttcaactgtatacaggggactataccaagctaaaggcttctttccatcgcttattacgctccctatacacccaattcttttctcgccttcctttcgccatatttcgatgtggatattagggctatgatccttgaggggataaaagtcgtcgaacaggcgcacggtcttttcgcccttgttcgtgaacaccagcttgaagtcagggaacgtctctcttgcgtcaaaccgggtcttttccatcactacggaacattccactccgttgtcggccatgtccccccatgccgcagcatggagggacaggtttgccagaagtattaaataccggaagatttttttcattacagcgcgagtttggccgtcgcccggagcatcccccggaaacaatccttaccctgctgattatagtagcgcgtttcgagttcacaagaacattgtttccagccttccagatcgacttcatccaggcataccggaatcgtgacgctgtattcccggccgggggccagttcccggtagttcaagggtcgctggaaggtcatggtgccaatttccctgttcaggatgcggacatctccccgttccgtcctcaatacagtcacgaaaaagtaatcggctgtttcgtcgttgatttcgtccggaatccggacaggctcgtttccttcgttgcggaaggagactgtaatttcgcccttcatgaaattggcagtgtccacaatggagagctgaagaggtgtcgatacctctgcaattgccatactgcgggttttaccttcgttaaccggaggcaagaaacagggcggctcaataataccgggttctgttacatttgtgggtactttgctccatcccttgatttcggctaccctgataagcttgcgggtagtgttattcaggaccttttgtccggcacagtaaggtctgtcacctgggttatccggcaatttttttatgtaagcgataacctctgtcataaagttaatgctagcatttacggctgtcagatccatcgcagctacggcggtttccatatccttaactttatcgcaggaaagagttttctcttccaatttttcctgtaatttcaaatgtttccagtagaatttgtaggcatcttcccattgacggcggtggtgttcttcgtgggcgagagaagcttccgccgtgtgccatatcccaagaccttcaccgctctggtatccgttcaaatcgttaaccgccataatgcagtcctcttcattggtgggaggtgtaagaagggcatcaatgaacgacccggtacgaacaactaccgtagcgccaccagaagcagaaacaacgcgacacctccatacattctcagtttcatccttacaaaccgttacaacgatgttaacaggcgtgttttttgtctgactattaccttcttcttccgtggtaacaggttccggtttctcaaattcaaattccacgtttttggacggttcgcaggtaatggtggattccttttcaatcgtccacaatttgattttgggggacggtgagaattcgcgtttcatcgtcgagttgccttcgtacttcccttcctgaatgggttccctgtccatcgtcacattgaacgcggcagcgttgttgctgacgggggtgtaggcattattcgtgtaagacaaggccaccttgtaatagccagctttcaggtacctggcacccgttgccagattcagcttgccgttgggctttgtcccatccttcttgcaaagcacgtcgcccgcaatggaaatgctgcctgtgtcgtcagcttccacgccgaaataatacaggccgtcttcctcgaccttgatgaacatttccggcgctcccgcgcaagtggcgtgctcgcacgccgaaccgtcaaagttgaacgtcatcgcgtcaactccgagtttctgcgggatgagagcctgctccccgtcgcagataagcttcgggccgaccgccttgttcaggggtatataattattcatgttcctgaattgtttcttgttcacagaactaaccatttagttctgtgaacaccttacagaaattccaaaaagaacaacaacacgccccggacgtgatgggggaaaatccccgattatctccaataaaaatggcggatgccatccagcgcccgccatatatatgttaatagtttggaacgtatcgctacgcttgtgtatgaattaagctagaccctacaggggctggtagccccgttcctcctgccggatgagttgcccctccgggatacagactctttacatttccgttttcggaaaaagcggggtttctgaaatacggattcaaggcagtagggaaaaataatacggaaacgctcggcacggaggcttgcgccgccggacgggcattgaatggtatttccgttcccggagttatagaagaaggtcctggatgttgtccgaggagatgacgcccgtttccgtggaggacagtacgcagagggcgtctaccaggttttcctgccccagagccagcccggcttcctccaccagcacatcgtcaatattcaaggtggcgatggaaaggggagccgtttccggggcagaaggttccatcagggctgcaatgccgatgacggcagccaccagggccgccgcagcagctccccaaatgcggaaggaatgccgcttgaagtgatgaatggattccaccggaacggcgggagcgcattcttccctttcaatacgcatcatgaccttgcgggcaaaatcgtcccccggcgcaggttgggaggcatgtcccagaatctgccagagttttgtatcgtcctgttcgttcatggttgtggttccgctgagggttctatgaagaaaaacaccggaagatgggtccggtttcttgccggtgtcatttttcccgttctgccgcctgtctgatgacgggggccagtacggcggcgatgcgtgcgtaaccggccgcagaagggtgcagtccgtcgctggaaagctcttccgggacgtatccgtcgctattagccatgacgcgtcccggttccgtataaatgaaattttcttccgcggccaggcgattcaggaggagattgatgccggcaatgcgttccgccgtaccttcccgggcgctgttgcgcgggtaaaatccctggaggatgatgacggcttttgccagtttgccggtgatttcccggcagacggcacgaatgccttccaggatttccccgtccgtgttttccgcaaggttgttcgtgcccaggagcaccacgcaaacggcattgtcttccgcaccgtccagttctccgtggcggagccgccacagggcgttttccacccggtcgtagccaaaccccagattgaccgcccgcattcccgccgtgcacaggttccatgtttccggggatttttgcaaaatgtcccggtgcggttcatccacgggcgcacctccccagaaatgcgtgatggagtctccgatgaaaaggaggtccgggtgtgtttcgcgcacgatgcggcatgcggcttcatgccgggacgcccagtcgtaaatcatgaagtcccggtcctgggtgcagggaatcagcgtggagggtacggcccgggcgggaggaggtccgggcatgatgaaggtttccggggctgtaatgccgcgctttccccggaacaggcggaagcggatgcgcgcgccgggcggggcctgcaccggagccagatagcggccctgcgtgcagagcatgcggggagagtccgcattcacgtctattcggatgacggcttccgggggagcgttcaccgcggtaagtaccagttctcccgcctcattcagggaggcgcggattccggggggtggggatgattctgtcatgagacgtcgcgcatgtgctggcgcatttgcctgcgtccgatggagttcggcccgcggctgtcctgcatgcagtagttcacggggcggctctgggaggcgccgtggggagcgcccaggcgcttgtccggctctgacggcagcagatgcaccactctcttgtttttccagaccagccagagcaccactatggccgccagtgcggagatgtgcaggatgatgccggctacattggccagggcgaaggtcatccaggctttcatcatggcatggagggaggattcttgcgtttcctccggttcctggatggtgatgttggcttccgggatgctggcagggttgtcaggctccagtgcgggaagggtgggcctgggggcggatgccatgtccgcctccgttcttctggccagggaaatcatggcctcaatgagttcgtcctgcggattggtgaatcgggaggcgtcctgcttcacctggtacaggagatccctccgtcccgcatccccaagctgggagctcagctccggatccagtgcgatctgggcgcttttaatatcccccatgtggaaatggagcagcaggttgcgctccttgttcctgaatatctggcgggcgatggtgggagcattgacggaaggggggactttctgcccggccgcgaagatgctgacgaacaggttgacgttgtagcgggatttgatgagcttgataagttcgatgacgtcattgctttccacttccgcaagaagcttctgggggtcaatcaggcctgtggaggtgcggatgtagtccggcaggaaatattcattgacgtccgtaaagtcctccggaatgggatccactgcgggggagtttgcattggcggcgggttccggcatggggtcggagggagccgctgccgcatccacagggggcagcaagggagggttggcattccaccacgcgcctctcatcagggattgctggtcgcggttggtccatttcagggcgggtaattcctgggcgggagccggaaaaatggacgccgccagcaggcatgggaacaaaaaggggttcatgcgcctcctcctttccggtcctcgggggtgggaagcgttaatccgtagcgcatgggatgtctgactttggagcgcgctttcctggctacgagctggacggcgtttttcatgatggaccccgcagcctggagcagcatgctttcccgcaggggaatgcgggctttcatgatggatttgttgatcaggtccggctctacataagggtccagttcatagccccacatgaagcaggccgtgtccgtgcgcacgtccagcaccagaaccaggagccactggggatccagcggtccctgatggttggggaagccggcctcatccaccgtcaggtggttcatcgtccagaaactgtgcggaataagggaaaagggctccaggatgttggggaaatagacggacaggagaacgggggggatgcggcgttccagtttctccagcagggcattcagctttatgcggtcctgttgtcggagagcgccggcgttgtcgcatacgcggcggtagggtatggcgtctttgccgtattttttgtccaggttttctagggaaaaaccgcagtgagggcacaatgattccgccccgcggtggaaattatgtaaacacttcggacaagtcggcacaaggaaagtttaagcacgaagttcgttgccgaaaagactaattgtcagaaagaaatcatgtatgtctcaatcttccagattttctttcgtgacacggtaaatggcggcgcatctggggcacgtgacttccagctcctcttctccctggaacaggtcttccttgttttcctgaagggtcttgagcgtgggcaggatgcggtccagcgtgcagccgcagtaaaagcggaaccggcgtgtttccagcactcgggtattttcatcttcttccagatgggccattttctcccgggtgagggaagcaagccattcttcatccgcgtcaggctgggccgtcaccatggtgtagcattcatccgggagctcaatgcagcgggcgtttctctgttcgctttgcctgtagaattcctccacccaccgggccggagacgttcccggaatgggtacgacggagtattgcggttcaaaccccttgcggagcagggtggaatacagcgtgttttcttcaggttccttaatgtcctgtgtgaagacgcgccccacgacggattccgtcagggaagaaccggtgacaaacaggttggcgacggcaggcgtccggagattgactgtccaggcatgttgttccgcccagggacgtgcgaccatgtaaagggtgaaataggccatgagttctttcagcaggctgtcgtagagttcttcgttgcgcaggccgtactgcatgaggtgaaggtagtaatccgtaaacagtggagaaaattttgacctgagcgccagacaattgcgttcgcggacaaagatggattcaactgtaatgaattcttctaccagttcttcgctcatgccattcaagttcggtcttcctttgtggaaaatcaaccgttcctcctgtcattagagtctatcatgacaggtaggcgcggcggcggtctttttcccggcatggaaagaggcggaagagtggctggagggaaatgacggaggggcccggggactgcacgcaataagcctttaccatgcctttccgcgcgtttaacatatacccatggcaactgacaaaaatatcaccatccatacttccaagggcgacatcaagctgacggtgtttgcttccaagacgcccgtgacggcggcttcctttctgaatctggcgtccaggggattttatgacgggctcaaatttcaccgtgtgatcccggatttcatgattcagggcggcgatcccaccggcacgggcatgggggggcccggctacaggtttgaagacgagtgccgcccggacctcaggcatgacggccccggcgtgctttccatggcaaacgcgggccccggcaccaacggttcccaattcttcatcacccatgtgcccaccgactggctgaatggcaagcacaccgtcttcggcaaggtgacggaaggtcagagcgtggtggattccattaagcagggagataccatctccggcattacgattgaagataatgcggacgatctgtttacggaacaggccgaccgcattgccgcgtggaacaaggcgcttggtaagtaacctcattccggcattcactcggcggagcgcggcgcggggacgcccgttccgctgttttcctctctctgctttttcagtacatggttctgtctgttcaaaacctgcgtgtgcagtatggcgcgcgcgtcctgttcaatgacctttcctttacagtggaggatggggaaagaattgccctcgcgggccataacggcgcagggaaatccacgctgatgaagtgcatcgccggtttgaatgaaccggattccggctccattatcaaatccaggcattcccaggtgggttatctgccccaggaaggaattcatatccgagggcgcaggctgattgatgaagccatgtccgcctttgcggacctgatggatcttcaggagcgcattaatgtcctgacgcgggaaatggcggggctggatccccgttccgcagcctactctgaagttctcaatgaaatcggggaattggaactggtgctgcatgcccataattccgcccggctgcgtccccggacggaatccatcctgcgcggcctgggattcaaagacagggattttgaccgggattgcggggaattttccggcggctggcaaatgcgcatcgcattagccaaactgctgctccgggagcctgaagtgctgcttctggacgaacctaccaaccatttggacatccagtcccaacggtggatggaacaatacctgcgctcctaccggggcgctatcatccttatttcccatgatgtggcgcttctggatgccctggtttcccgtacgattgctttttaccacggccgggcggaggagtacgcgggcaatttttcctattttctgaaagaaagcgtgctgcggaaggaaattctgctgcgccagaaaaaggctcaggaccgggagattgccaaaacgaaggaatttatcgaccgtttccgttataaagccaccaaggcttctctggtgcagtcccgcatcaagcagctggaaaaagtggaactgattgaggtggaagaggatgatgccgtcatgaactttcactttcctgctcctcccgctggcgcccattctgtggtcaggctggaaaaggtttccaaacattatggttccgtttccgtttttgagaatgtggattttgaaatcgtcaagggggaccgcattgccattgtaggagtaaacggggcggggaaatctacattttcccgccttatttccggcggagaggcccccagttccggcagcgtgaccatgggacgccatacgcaggtagcttttttctcccagacgcatgctgatgatctggatccggataaaacgattctggaatgcgtggaagctgccgccacgcgggaatctgcgcccatggtccggaatctgcttggctgtttcctgttccggggggatgacgtacacaagcgcgttggcgtgctttccggaggcgagcgctcccgcgtggcgctggtgtgcatgcttttgcatccagccaatttcctgattctggatgaaccgaccaatcatctggacatccagtcccagcaggtgcttcagaaggctctgtccgaatatccgggttcctactgcatcgtctcccacaaccgcagttttttggatcccatcgtgacgaaagtgctggaatttgtaccgggagagaaaccgcgcgtttacctgggcaatgtttctgattatttggaaaaggtggagagggaccaggccctggttgccgcagccgcctcacccccctccggagcggcggaaccgggcgccggattggatcgcaaggcacgtaggcgcatggaggcggaaatccgtcagaagaagacgcgcctgctgcgtccgcttcaggagaaactggagctgctggaagaagaaatagcgcggctggaaacggaaaagacggaaattacttctcaatgggagcgtccggaagtggcggctgatacggaagccgtcatggagcttacctcccgttttcagcagacggaccggcagctggaaacctgttttacacaatgggctgatctttcggaaaagattgaagagacggaagcccgcattcaagaagaggcggaaagaaacgtttccggaagctgagaggatttctcaacaaaaaacagggctgtttccgggaacagccctgttcggacagaggaaaaaatcagaacttcaacgcttttccggttatacccggcggcgcagaagcagggcggccatgccaagaaggctgagggaggccgtctgcggctccggtaccgtgtccccctgaagattcaactgggaaagccccaggaaggttcctccggtgttgggagccttggcattcacggtgagggtaaaggtttcccccgcactaactgtgaccggggtattgaagctggcttcctggatatcggccgtcggcgtgccgtctttatcagcctggactcgctcaaagctcaggtcagccgtggcggaggaatctccggcagtcagcgtaacggtagcggttcccgctttagtatccgtattgctatgacgctccccgcttgcattgacgaattgaaaacctaggctgagggaagaaaggacgatgtcctgcgtagctgtgaagaaaaaagtgacagtccaaccggtttcatttccattcatttgaaggttgggaacaagaagatccgctgccagattgttggagagggcggtggaaggagtggtgagagtgacggaagcatcttccagaaaatcgctcccagtagtaatgctggtttgatgaaactgggtttcatacagagtggacgccgcctgtactccggaaatacacaataaaaatgttgaaatgaaaagaagactcttcataggtccatgttagcggattagatatccggtgacagaggataggaaaatgggaatggataaatacacacattactaatgatttatgaaaaaattggaaagtgtttattgtgtattaaaatttcactttcataaatcattattcctgttttcccgtggtgatcaactcgtttttcttcaaaaaatttcgtctgtcaccggatatctaatccggaggcaatctttcctgcggagtaataaatgaatatttgtccgctgcggaaaatcatcagcctgacatggcctggaagggtttccgcccatttccatgcaaggggaaaaatagagggaaccggcccgggagaaaccggctttctttcaggatagccttttcttcccgcttttccgtgttttttttctgtactctgaaatcgtgacgccgcacagggtaagcagaatccccgccagggatatccaggtcaggcgttcccccagaatgatggctgaggccaccacggttacgaccggtatcatgtaaatgtaaacgctggatttgacggctcccagaatttccaccacgcggttccaggtcagaaagcacagtgcggaggcgaacagacccagatacagcagattgatggcattgacgggttttgccatcaggcgccagtccatgtttgcaggaaggacccacagggccggaatcatcagtgcaatgccatagaagaaaatgcggcgcgtgcagatgatcatgttggatgtgttgacgccgatttttttcatcaggatggaatacaccgcccagacgaaggccgcgcccagtgccaggatatcccccgccggattcagttccagaacgaaggctccgtttgccatgataaggaagatacctgtaaaggcagcggaaaaacccaggaagaaacggcgtgaaaagccttcccccttcagcaggaaatgggccagaagggctgtgaagaaaggaaccacggctacgataatgcccacattggaggcgaaggtataggtcagggcgatgttttccagcaggaagtacagggtaaccccggtcaatcccgctccggcgaacagaagctcctttttccagccggagaatggaagaacccgcggtttcaggcaccagaggaaggcatatccgatcacaaagcgggtaaagagaaccgtgacgggggtgaaatcccgcaagagcaccttggtggagacgaaagtggtcccccagatgataatggtcatgagggcggcggcatggcccaaggtgcgctgtcgggaactcattaaattgacgatgtgggggaggaaggcgtttccagcgtcagtcccaggatttccgccggttccgtattcctgttccagacggcatggagaacgccgccgggaacgagctgggattcgtactcgtgaaccgttctttcttctccgtcaagcatgacagaaaccgttccacgggtgacaatgaataaatgagcgtgggcatggcggtgtggggaaagggggccgccgccgccgggggctattttggcgaaggctccgcctctcaggatttcctgcccgtccatgaacaggttcctggccgtgaagcccgtatgattgggaatagaggaaaaggcgtccatttgtttatttgcgtgccaggtcgtatccgtccttgcggtctttaatgacccagcccagcgctgccacttccgccctcaggcggtcggcttccgtccagtcccggttctgcttggcctgccagcgctgatccgccagggtgcggatttcttccggggcttcctcctgtccctcctccggcagaataatgccgaaggcggccagaataaagtggaaagcattccgcaggcgggccgcctcctccggtgaaagggaggggatatccgccttcctgatggcgctgaaaacatggcccagggcttccggagtgttcagatcatcgttcaggctgtcccatgccggctggaaaattcccaattccgggaatgccgcgcagaattcctcataggagggaacggaatccgttccggaggcgttcctgagctgcatatcgaatttggacaggcggttcagcgcggctttagcgtcttccagagaggaaagggtgaaattcaacggacggcggtaatagccccccgccagcacgtaccggaccgcggacggcctgtggcccagtttgtccaaatccgccagcgtgtacatgttgcccagggatttggacatcttgcctccgtccaccagcaggtgcgtgatgtggaaccacaggcgcgcgaagcctccgccgcaggcgcagcgggactgggccacttcgttttcatggtgggggaataccagatccacgccgccggagtggagatcaaagtcattgccgaagtatttatggatcatggcggagcattccaggtgccagccggggcggccttctccccagggagagggccaaaagttgtttccgtcttccggcctgcggctcttccacagcacgaagtctgccacggagtctttttcatattcgtctgcgttggaccgggtattggcggtttttcctaaatccagttcacgttcgtccaggtgggaaagccttccgtattccgggaaggaagaaattctgaaatacacggaaccgtcttccgatacataggcatggcccttttccaccagtgtttgaaccatccgtatttgttcgggaatatggcccacggcagagggttccgcatggggaggcaggcaattaagggcggcacagtcccggtggaacagatccgcccatcctgcggtgaattccgccagagaaacgccagccttttgagaatcccggatagttttgtcgtccacatccgtcagattacggatatgcgtggtgggcactccccccagttccaggacgcggcggaagacgtcctgcatcacgaaagtgcggaaattgccgatgtgggcagggccgtacaccgtgggtccacaacagtaaaagcgcagtgtttttccatccatgggagaaatgtcctgggccgttctggtgcgggtatcgtaaaggtgtaacatggcggaacgattagaagggaagagggcttcccggtcaagcgggaaaagaaagccggggatccgcggttgtccgcgtccccggctttgaagaaatcagaggatggcgagagaaaaggaaacgctatttgtccgcgttttgctggccctttttataattctcgttaatacgttcgatttcctcctgggtgatgaatttttcccggtagggtttgttttccacagtgcgttccagagtatagccgaaacgcttctggaaatgtttcttgtgggtttccattttcttttcaaactcttccaggcttggacggttcttgtggctgccccacgcggtttcggaaacagccatggcgcgggggtaggtcatgtacatcagcaattcgccggagggaatccattccgcccacatgcagaggttgattcccttgatgtgcttgacgtcattcttgtcccgtccgttgcggggatcgaagttgtagcagtctttcagcaggatgggagctccgccgggccgggcgcgcacgtcgtccgccgggaatttcatctgggtacgcgccagataatacttgaactggggggtgacgatgaggtcgatgccctgttccttcgtcttatcaatgcaacgcgggaattctcccggcagccaggacatgacggtttcccccttgtggtaatagctcttgttgatgtcataccacaggatgggctttttccggtgcttggcgagcatggccgtcaggcttttcgtgaaatcgctcatctgggcttccacattatccccctggccctttttggctcgggcggcctggcagtccgggcacttcttccagtcccccatggggcattcgtcaccgccgatgtggatgtacgggaaagggaatatctgctggacggtattgaaggtatccttaagaaactttttagtggccggtttctgcgggcaaatcagcttggaggaaacaccgccgtgcgtccatacctgggcccgtttggtgttgcagcagaattcgggataggacgcggccagggccatgttatgacccggcatttccacttccggcagtacctggataccgcgcgctttgcagtaggctaccaggtcctggagctccttcttggtatacatgccttcattggccagcagggagttgttctggctttccggagcggaggggcggacggcgccgatggtgcggagcttgtcgtagcccggaacggggagacgccagccctggtcttccgtcagatggagatgcaggacgttgtatttgtaataatgcatggcgtccacaaaattgtagatctccttcatgggatagtggtagcggcctacgtcaaccatcatgccgcgccagccgaagtcgggggaatcctggatgctgccgcagggaagtccctcaggagtatccgaaagctggtcctggagctggaacagggtcgccatggccatggccttcccgttgggcgtggtataacggagttccacgccgccaggcgtcagtttcatggcatacccttcattgcccagtccggcgactttttgctcatggacgattttgaggtttttggtagttccggaagttgtcgtcacgttgacgggctccggaataatgttgtagggattggttccggcccagcagagggagcccaggaacgctgcggctagcaaaattgatttcatgcggtgcgtatggtaatggttgttgtttgtgtgaggatttaaaccctgttcctccgtcgtcaatggcgtgttccggacaaccgtgtttcgggaggaacggtgaatggcggcgtcaatctctggagggagcgcagtcccactgcggcttgacggccagtttgccggtggccccggggaagccttccggtacctggcagtctttgcggagcttgccgtacagggctttgagttctttcacggtttccgcatattccggtttgttgatgacgttgtgcatttgggacgggtccttctggttgtcaaagagcatccattcgtcgctggtccagatataggacagcgtgtagcggtccgtgcgcaggccgtcatggcgcggagcgttgtgttcacccggattttcgtaaaaggcgtagtaaagagaacggtttttgaaatcctgatgttctccggtcttgaacaggggagtgaggctgcggccctggaaggtattcatattttccttggtatttaccccggccacgtcgcagaaagtgggagcataatccagttcctgcaccatggcggaggagcgcacgcccggcctgatgtggcccggccatctcatgatgaggggcatgcggaaggattcttcgaaaatccagcgcttgtcgtacaggccgtgttcgcccatgtagaatccctggtctccgcagtagagcaccagcgtattcctgtccaggccgttctgtttcagatagtccatgatctggccgatgctttcgtccacggaaagaacggtgcccagatagtcttccatataatggcgccagcggcgcagcaaaatgtcgcgctgcgttttgattttcccgtttttaatatctttgacaagctgtacggtacgggccttgtggtagttgtaccaggcttccttctgctgcgggtccatacgcacccattccggcatttcccagtcatactgagtatgcagggtcttggattccgggcaggaaagcattttctggatgtcttcggggaccacctccttgatcaggtgttcgtcagaccatacgttgaaatggttgagcagggtttgttccgtcattttcaggaattccgggcggtctgcaaaatcgtcttccagattggcgggcgggtcaatggcgtccgcatactgtttggcgcggcccatattctgaatggaggggcaccagcaacggtggggtgccttgtggcccacgacgagcatgaagggtttgttcttgtccctctggtccagccatttgaggcttttttgcgtaaccagttccgtggcatagccgggctccgttttcaccacgcgtttgccgtccttgccgggagtgatgaaatccggattgaaatagttgccctggccggggaaaatttcccagtaatcgaatccggtggggtcggattcatatttggacgtatctcccttggcgcccggcggaatggcttccaggtgccacttgccgacaatggccgtctggtaaccggccttttggagcattttcgggaaagtgggctgggaaccgtcaaagggagccgcatgttcgttgaagaggtacccgttcatgtgggaatggcggccagtgtaaatacaggcccgcgaaggtccgcacagggagttggcgcagtagctccggtcaaagaccatgccttcgtccgccagtttgcggaagttcggataaggcatgggagaatccttttcacaggtacccagggtctggtaggaatggtcgtcggtgacaatgaccacgatattggggcgctggtccggcgtctgcttttgaggctggtccgcggaagcggacagggaacaggccgcaagcatcagggcggtggcggcatgacggttcattgttgaaatcatgaattaaacaggcgaatggttggagggggatgcggcagaatttgtccgcaagggcattcctgccggtccggaaaagaccacatccccgaaagaaaaaacgctggaagagagttttaggaaaaataaaacatcagtttcatatttcaatacaaaaatggggatggagcggaagcccatgaataagccgttccgcagccggacggcaggagaaaagccgtttaggcgccacgtgggccggagcgcttgttccggccgttgttttcatgggattctttctgctccaggagccatgttctgtcttcaaggctgagccttttcagggatgttctgctctggtgcccgtccagctcctgaagccagagagtctgggtcttttccgaataacgggaaagcttggcgaagacggtatttccgttgactcctgtccagacccggtagcctttgggaatcagcgtttttttaaactcttcatattgctgcttcgccagtttgacgctgttcttgatctggtcaaaataaagggcgttttgtccggtataataaccgcgcaacgtatccactttggagccgtccggagacatgaccagaagcacgggcgttcctctcacgccaaacagggagggagcctttttcacatactccagcatcttctggcgcttcctgtaaacaggttcgctttcaaatttttccgcctggtcgtaacagacgcggacgacattccttttcgcccagtcttcaaattccttcgtatggagaagttctgcccccagctttttgctgggagggctgcccacggaatggtggaaccagatgagaatgggttttccggtactctgggcttcccggagggcggtgggatagctttggatccagcgttcgttttccttacgctgggcgaaagcttcttccagcccggggatgggggcgtccgggtcatgagcgtccgtgtaatagacggccccgctgtctgccctggtcatttcctcctgtgtggtggcggtaagatgggtggcctgttgctgattcggagtagtgctcaacagccccgtcggcacattggcgatggaattggtcttgttatcctgcatgtattccgaaaggcttttttttacctttggttcttcctgttccggagaggttcccacgcaggaacagagagccgcggacgcaaacaggagcatggacagcctgggcagactcatgactgacctgatagcataacagggaaaaatgcgcaaccgggaattgttcaacggccgcggcggtttcagtatttcctggcttcctgttccttctgcttccggtcccgtatggcgatatccagggggtgcatgtagcgatcgttgatgtggctcaccctgctggtgcgcagcttcttttcgtaccgtttgccccggtttcccctgaacaggaattcggaccccggaatgcggcccacagtccggtagatcagctcgtcgatttcctcctcttcccggtagcaagccagcctgatgtagcattcctcctcccggggatggttggggaagtagtgcagaaggtgtttcatggcccatattcaaacggaaaaatgtataaatccgggaaggaaacggaagaccccgtttggatgccttgagggaagaaaatgggttaatcccccgttttcagcaccttgatgaacgcttcctgcggaatgttgatttttccgatggccttcatgcgctttttgccctccttctgcttttccagaagtttgcgcttgcgggtgacgtccccgccgtagcatttggccgtcacgtccttgcgcatgggggagatgctttcccgggcaatgatctttccgccaatgcaggcctgaatggcgacggtgaagagctggcggggaatgacgtttttcaggcgttccgccagttccctgccgcgggaggctgccttgtcctggtgaacgatcatggagaaagcatccaccggttccccggcgatgagcatgtccattttaatgagcttggcggcctggtagcaagcgtattcataatccatggagccgtagccgcgcgtcatggatttgagcttgtcgttgaaatccaccagaatttccgccagagggacggtgcaggtgagcatcacgcgcatgtcgtcaatggtctccgtattgtccacgctgccgcgtttttccaggacaagctgcatgatatccccgatgtattccccaggaagcataatgaacaccttgacgataggttcccggatttcctgaatttcctgcggttccgggagcaggctgggattatccacattgatttcctctccattggtcttggtgacctcataaatcacggaggggtaggtggagatgatatccatgttgaattcccggcgcagacgctcctggataatttccatatggagcaggccaaggaagccgcaacggaacccgaagcccagagctacggaagattccgcctggaaggagaaagcggcgtcattaatctgaagcttcgccatggccgctttcagggcttcaaaatcggaggaatccaccggataaatgccggaaaagaccatggggcggatttccttgaaaccgggcaggggggatgggcaggggcgcatgtaatccgtatacgtgtccccgatcttgacatcagccgcggatttcatgttggcgatgatgtagcctacgtcaccggcttccagggaatccgttcgggtcattttgggagtgaagatacccacttccttcacttcatacacttcgtccgttgcgaaaagtttgactttcatgccgcggtgcacgctgccggaaatgacgcgcacataggagactacgccgcggtaggcgtcgtaaacggaatcgaacaccagggcgcgcagaaggccgtcctgctccgtttcaggcggagggatgcgctgaacaacggcttccagaatatcgtcaatgccgatgcccatcttggcggaggcatggatggcttcctcatgggggatgcagacgatgtcctccagctggcggtacactttgggcaggttggcgctgggaaggtcaatcttattgatgacggggataatggccaggttcagatccatggccaggtgcatgttggcaagtgtctgggcttccactccctgggctgcgtccacaataaggagggctccctcgcatgccgccagggaacgggacacttcataggagaaatccacatggcccggcgtatccagcagattgagcttgtaagtctttccatccccggccttgtagaaaatggtaacggggtgggacttgatggtgatgcccttttcccgctccaggtccatggcgtccagaagctgatcctgcttctcccgttcggaaatggtattcgtcttttccagcagccggtcggaaagggtggtctttccgtggtcgatgtgagcgataatggagaaattgcgagtcagttcaatggacatggtggtctctacccttctaacatgagtgccctgtgcgcggggagggtaacatagcccatgcggcggtcaagacttgaacatgactgcctcccgttccctgccgcgtcggcttcattcgctccgggaaaaccgtcattcatgacaggggccgcgccgggagattgaacgtgagggaagaaggaaggctctcaaccggtacaggcacgcggaccttttcccgtgcggtcatttcttacccagccagcatatgaaatcttttttagcagccattttaagcctatttattcccggtctcggccagttgtacaagggccactttgtccaggccatcatctggttcctggtggtgggtgcggcttacggccttctgtattggttcatctttgcactcgttcctattgtcctgcatatcatttgtattttgcaggcctacttcatggacaatgaatgatgattgccgtttcggcttcacagccaggatggctgaaagggcagcgcatcctgcggatcggcagcggcattcattccctggggttacagaaggaatacgtcgttcatagcggcatcattcttcctcataccggtattttcaatgtttacggggttccatttgttgaccgcggaaacgtaaacacaactttttgactttgaattaatcaatattttcgggaagcgggccaggggaatcatcctccgataaacaaaaacccagagccgttctggaataattccggagcggctctggagggtcaggaggaaggcctttcgggggtggggccccctccttgtgttttccttcttgttagaagtcgtagcggtagccgatgcttccgttcagcgcgctggacccatcccggatgtccgcgttcccgttcacgtagatggttcccttcgttcccaccggcacgctcagtccggctcccagctgcagcgccgtcgttccctctttcgcccccctcacgctttgcgcaaagccggggttgcccagcagagagacgttcgtttcccccctccggtctcccaggtcctgcgccgcgtttacgcggatttccgccagcgcttctcgtccgaagatgttgctgcccaccaggcccatccaccggccgcccagcgccagcgtccccgtcgtccagtcctgcctgccgacgttcaggcccgcgttgcccgcacccgtttcctcatagccgtccatccgcgtcgtcaccaccgaggcgttgaacagcggctgcagcacgctgctgcggttttcgttgaggtatacgtcgtaggtgagttcatacatcgctccaaagccccacccgctggtgcttccctgcgtcccgtagcttccttccccgtagttgaccgtacggttgagtttcgcgtcgttccaccctcccgtcaggatgagcgtgtgcgcccagcgcctgtcctggtagcggccgaagaggctggcgtagtagctgtccaggtgcccgtcggcgctgtccgccgcgccggccgtcaggtcgccgtagccggccgtgaaggccgctcccaccgtgaggcggtcgctgaggtccgcgtccacgcctaccgtgcctccccaggtggtgagctggtagccgctttcatccccgcgggtgtcgagcttggcgtaggagcccgtgccttccatccacatgtggaagcgggggaggtcgtcgttgacgtaggccgggttgactcccatgagggtggtccggttcctgatccagcccatctggtcgcgcagggcgtccttctgcgccgtcccaagcgcgttgaccgtgctcccagctgccgccgccatggcgcgggaggctccggagaggttgccgtcattgatcatggtgctgacgccgttcatgaattgggccagctgggagtcggggtccaggtttttgcgggcttcccagagcaggctggctccggcggcggagttccacgtgtcggccgcggaggcgaagaggttttcctgccggagtgtggcattgagcaggatgtcgtttccgtcgcggctcagcgtggcgtcctggtagtagacggcgaagaggccggatatccgggcggcgaggctctgcccgtcttccaggccgctgatgctgccggtggcgctcatcaggacgacgtcatggaggtcgctccccgcgttcatggcggcgtttccttccatgttagagaggaggaagcctgctccgtcctgcacggtgatggtgcccgccgtcagcatgggggcgccaaagggggcgtcctggttgaagttgtagatcagttccgtcgtggagccgttctggaaggtgatgttttccacgttgagcgtggtgttggcgctgccctgggcgtccccggtggcttcaatacgcagggtgccgttgtttccggcggtgatgctgttgtagttcagcgtgggggcgtccgcggtgcctttcaggaccaggacgcctccgtcacggacggcgaggtcgtagtccttattgccggtttgcaggtattgggtggcttgcccggagatgtccagggtgccgctgcctgccagcgtgccggagaaggttccggaggaggttgttgccgaggagatggagaggctgcctccgttcatggacagggtgccgctgccggagaggctgctgatggtgccggattccgttccggagagggccagcgtgccgtcggcggtgactgaggttccgtccagccgggcttctccgcccagggccagttccgctccttcctggatgcggagggtgccggttccggtgatggagccgtcgtttatttcgcctgttccggtcaggttgagagttccctggatggtcagggagcctccggcttccgtgccggtgatggttccgacttcggcgttgccgttaatggtcaggccgcctccttccagagtgagggtgtccagggtgtttgacgcgccgttgaggacgatgtttccttcacgcagggcgagggtttccacgtccatcgttcctccgaccgtcagcgtcccggttccttccttgatgaaggcgacgttgttgcctcccgtgatgctgccgcccatgacggtgtcctggccggccgggtcgatgtcgtcttctcccgtcgtcatttgtttgttgttgaggatgacgacggccgtgccgtctccggtgttgttgacgaccaggctgctgcccgtggctcccatcaggttgttgattttagctccctgtccgtcggattcgcccggggctccggccaggttgaccgtcagggtctggccgccgccgatgacgacgccggcgtagccggagagcgtttgataggagttgacttcatgggcgtttccttcttcctcctgcacgcggtagaggccggtggccgctccgctgagcaccaggctgcctccgtccgttccggtgacccggatgccgtagttggacagaaggtcggtagtgaaggcgatgtcgcccaggtcgccgacggtcagcgttccgctggtcagggtcaggtagctggaggagtcgtcggttttgtggtccagcagaaggttgacgacggcgtcgttgctcaggtccagcgtcagcccttccccctttatggacaggttcgggtcgcttcccgttccgctgccgttgctgatgacggcgccagacgcctgcgtgtcctggccgatgttttccgttcccagggcgatggtcagtccgtccaggcctccttctcctacggttacggttccgctgactccggtgagacgggagccggaggcgatgttccacgttcctttcatatggctgccgcttgcgccggagaggttcaggctgccttccgagatggtgattccttccgtggttccgtcaaggatggtttccgctcctgccgcgtccgccccgagtgtcagggttcccgctcccgttttggtcagggccgggctgtcggtcagcgcgtagatggtggccgaggttccttcctgcgcgatattgatttcatcaaaccgggtgaaggtgacgttttggaagtccccggttccaaaggttcccttgagttccagcgtcctgtttccttctaccgccgctccggcgcttccgccgatggtgatgccgctttcttctccttccgccccaaagatgcttcctcccgtcagcgagacgtggacttcgcctcctaccgtgccacagttgcccgccccgtagatgtctcccaggtaggtgccctgtccaagggtgacggtgatgttgccgccaatgctgacgggcagggctgtgggatcttccgccgtccacgtgcttcctctccaggagccgcccacgattttgcccgtgaaggtggagcctccgtcaatggagacgctggtgtttccgttggtggtcagcgtcgtgccgttgccccagttccagaaggagccgcccatgatgtttcccgtgaaggtgattccttcttttccgctgatggagacgcttgagtttccttccactttttgtacggctccgttaccctcggatttcgtgtttgcgtaactgcctccatagatgtttttgacgaagttgttgtgcccttccgtgccggagagttccgcatcgcctacattaatcgttaccgaggtgttgccccggatggtcgttcctgaagtctggttggccgtccacgcgcttccgcccgtgatgaagttttgggctgtgacgttgccgaagtctcccaggttgacggtcgcgctgttgctgtgctggatgttggtgaccaggacgctcgtgtttcctgtgatggtggtgacggcattgtgggaggaggtgcttcctccgatgatggctcccgccacgatggcgttatccttgacggtaacgttggtgtttcccgtcagggtagtgcttgctcccttgttgttcccgccgatgacgtgttccgccgtggcttttccagagatctgcacatgggtgtccccagtcagcgtactggtctggaggttggtgccccattcattggtgacacctccggcgatgatgccgaatgctcctccgttgatgtccatccagatgtccccctggtagttgaggttgccggacggcagggtcgccccgctgttgtataccccggacaggttgattttagttccgccggtgttggtgatttgatagactttgtccccgctggtcgtcagggtcccgttcagatatcccaggctgacgttggccgcactcccctccccaagagccagcgtaaaggcgttcttgaccgtttcttccaattcccctccttctcccgcagatacccacgtcacgctggatatcgccccgtcttctatcgtcagcacgctgccttctattctgtattgccctgtatctaagcccgtaacggtaaaattcgtgccgaggttgcttcctaaatcaaacgtgtatccctgttctccctccaccaggctgtcaagcgcgccgccgatgtcaatggtgcctgaagtgaaagttacattttccttggtaaaggaggatccggattccgtataggttagcttggctccgtcaatggctgcgtttttcaatacgccggtgccgttcatgttcagaacggcatttgcccccagagtggcggaggtgaaatccagcgttcctcccgccatggtgattattccggaataggccagggaagaattattgattttcaagatgccaccttgggccgtgatattcgcgttgatgacggttcccgtcaggttttgcgtacctgttccggccataatcagatttattcctcccgtgggagtagtgttgccgtttactccggaatgctgcgtggttgccccgatacttcccccatacgtgtaatttccgttacccgtcagggtaagattcgctctggaggaattagccgactggacgcgccccttatgtgttccgctgaagccgtcggcatcatttaaaccggccagagaggcggcattggaaatttgcagcgtcagggcgctggaactttgattgattgagcctgacaaatctaccgttgcgttggcgagagccgttcccgtaatctggagaatggcgccgccgggctgcgtccccttctgggaaaggataatgttcccggaaaaactgttttcttgggaaccaagcacaaacttggaggcatagccagcattgccgttagccgctaccagcgttaaatttccttctccggcaaatgccccgttcaaattgatggtacagccgccgttcgcattctgattaatggtaaacgaggaacctgccccgatataaagtcctgtggaataattgttgtttcctgaatttacatcaaggttgacggattggctcccagtaactgaatactcattggcgggctcattgttattaaaggtggagtccgctccccatgcgggggattcagatgttgggacggccagggaaacactggtgtaacaagccagaacagccgccagcagggtaataggcagatggagacgcattgcaaaaatgttagatgttaattttttatgtatataacggattgaaaattcgatgtcaagttgaaaataccagttcccggattctcatacttttactgtaagtgcattatgattttttaaatttctaaaatgggattttcatcttttcatttacctctccttctgaagcaaggggaggcatactataagactttcattctgaatataaaatatcaaattttatattgcatgggacaatattggaatcatcgccggattttcaatccgcttttcctttttcgtggaataacgcggagagtccataaaaaaggccgcaccccggaaacggggtgcggcccttgaagtgtgggtggagagaacaggttagcgttcgttgtcgaagttgatggtatcgttcaacatgtcttcggcaagttcctctgtttcttctttttcgctggccgacgcgatttcttctgcgccctctgcaggttccacttcaatcttgctgtaacgggagaatccggtgcaagcgggaatgaggtggcccataatgacgttttccttgaagccttccagggtatcggtcttgccgagggtggatgcttccgtcagaacgcgcgtggtatcctggaaagatgccgcggaaatgaaggattccgtttccagggaggccttcgtgataccgagcagaacgggcttggctgcggccggttggccgccctgggctacggtttgttcattgatgcggtcgaacgtggtcttgtccacttggtctccccacaggaattcggtatttccaggttccgtgatgactaccttgcggagcatctggcgcacgatgatttccacatgcttgtcgttgatttccacaccctggaggcggtacacttcctgaacttcattgacgaggtgttcctggagacgttccttgccgcagacatccagaatttcttccggagaaacggggccttccgtaagctgatcgcccagatgcacatggtcgtcttcatgaacgatgacgtgcttgttcatcgggaccagatggtccaccagttcgcccgtgggtgtttcaatggtaatgaccttcttgccgcgggaagtattcttgctgctgaggcgcacaatgccttccacgcgtgcaatggtgcaggcgtccttgggcttgcgggcttcgaacaattccgccacgcggggcagaccgccggtgatgtccttcgtcttggctaccttgcggggcgtcttggccaccattgtgccagcggagatggtttctccgtccttcacagtgaggttggcgcctgcgggaatggcatgatgagccagaacttcgcgggtcttggcatcgcggatgaccacctgcgggtgaagttcctgcttgtgttccatcacgacaagggaggaggcaccggtttcccggtccgtttccttggaaacggtgatgccgacgatcatatccttgaattcgacgatgccgcccttttctgcaatcacgggcacattgtacggatcccaggtggcgagggtttcatccttcttgatagtgccgccgttgggcacgtacaggatggtgccgatgacgggctggtaggattccagttcgcggccctgttcgttttcgatgcggacggagcagtttttattcaggacgacgaagttgccgtctgcgttttccaccgtgcggagatcttccgtgtagatgacgcggccgtcgttcttggctttcacgatgggctgcttgaacgccgtggtagccgttccgcccacgtggaacgtacgcatggtgagctgcgtgccgggttcaccgatggactgggcggcaataatgccgaccgcttccccgatcttcacttcctgtccggtggccaggttcaggccgtagcacttggcacagcagccctttttgagttcgcaggtgagtacggagcggattttcagccgttcaatgccgattttttccagttgttccgcctgcttttcgttaatgaggtcgttgatgtctacgataacctcgccgctgacggggtcaacgatgcgttcgcaggaagtccggccgtagatacgggaggaaagggacgccacttcttcgtcgccgtcatagatggcgtgaacggtgatgccgttgctggtgccgcaatcttccgcatggacgatgacatcctgggccacgtccacgagtttgcgggtcatgtagccggagtccgccgttttcagcgcggtatctgccagacccttgcgggcgccgtgggtggagatgaagtattccagcacggaaaggccttcacggaagttggccgtgatggggcgttcgataatttcgccgctgggtttcgccatcaaaccgcgcatgccggagagctgcttgatctgcgccttgttgcctcgggctccggagtccaccatcatgaagagcgggctggccatcttggagccttcgttgtgttccagcttgcggtacagagccgcctggatgacatccgtagtctgggtccagatgtccaccaccttctggtagcgttccccatccgtgataataccgttcttatactggcgggtcaccttgtccagctccgcataggctttttcaatttccgtctttttctgggagggaaccaccatgtccacgatgccgatggagcagccggaacgggttgcttccttgaagcccaggtttttcagggcgtccagagtctgcacggtacgttccttgccgacggtctggtagcagcgccagatgatgtcgcccatctgtttcttgcctacgttgcggttaatgtaaccgagttcccggggccagatttcattgaaacgcacgcgtccggcagtagtgatgataaccttcttggtgacatccccatacactacttcggaaggctttttgccgtagtccgggttgtgcaggcggatccagtcatggtagccgattttgcgggcggcaatggcgtattccacctcgtcaatggattcgaagaggggaagatggtgatggttatcctgattgttctgtacttccgcagcacgggtgtgcgtcaggaagtacgcgcccagaatgatgtcctgcgtgggtgtggcaatgggtttgccggaagcaggggagaaaatattgttgggcgccagcatgagctgccgggcttccatctgcgcttccacggacagaggcacgtgcacagccatctggtcgccgtcgaagtccgcgttgtacgcattacagacgagcgggtgcagacggatggcggaaccttcaatcagaaccggttcaaaagcctggatggagaggcggtgcagggtgggcgcgcggttgagcatgaccgggtggcccttggtcacttcttccagaatatcccacacttccggcgtcttgcggtcaatgagcttcttggcggagcgcaccgtgtgcacgtaacccagctctttcagacggtggatgatgaagggttcaaacagaatgagcgccatcttcttgggaagaccgcactggttgagtttcaattccgggccgatgacgataacggagcggccggagtagtccacgcgcttgccgagcaggttctggcggaaacggcctcccttgcccttcagcatgtcggagagggatttgagggggcggttgccggcgccggtgacggcacggccgtggcggccgttgtcaaacagggcatccacggcttcctgaagcatgcgtttttcattacggatgatgacttccggagttttgaggctcaggagggttttcaggcggttgttgcggttgatgacgcggcggtacaggtcattcaggtcggacgttgcgaaacggccgccttccagaggaaccagcgggcgcaggtccggaggaatgacgggcagaacgttcaaaatcatccattccgggcgtgtgttggactgaaggaacccctgggccagtttcagacgcttggcaatcttgcgcttgttctgtttggagttggtattgtccagctgttcctgaagatccgcgacgagggtgggcagatcaatggccgccagcattttctggatggcttccgcgcccatgccggcttcaaagctgtcatagccgtattcgtcttccgcattgcggaattcttcttccgtcaggatggcccccttttccagaggggtactgccgggatctaccacgatgtagtcttcatagtaaatcacgcgttccaaatggcgggccgtcatgtccagcataaggccgatgcggctgggcatgcatttgtaaaaccagatatgggaaaccggaacggccagttcaatatggcccattcgttcgcggcgcacgcgcgcgttggttacttccacgccgcagcggtcgcaggtgatgcccttatgcttgatgcgcttgtacttgccgcaggcgcattccatgtctcgggtgggcccgaagatgcgttcgcagaacaggccgcctttttccggcttgaacgtgcggtagttgatggtttccgggttgacgacttcaccgaatgaccagctgcggatggtatccggatccgccacggtgatggcaacctggtcaaaggtccggggcttgtcgctcaggccgtgcatttccctgatggtgggggtgtcagacatatattgaaagtttaaaggatgtttggtgcccgcccccacgttttgcggcacgggggcggaatgcggtggatattagaatttgaggtcggagaagtcgacgtccgccaggccggccatgtcgtcgctgtcaaagccttccgtcatgccgtccacgggagtgagatccgtgccgccgagttgcagggagggttgttcatccttgctgccggggcgtacgttcagccccagggactgcatttccttcatcagaacgttgaaagattccggagttccggcttctagggtattatcccccttcacgatggattcgtaaatgcgggtacggccctgaacgtcgtcggacttgacggtgagaagttcctggagggtataggcggcgccataggcttccagcgcccacacttccatttccccgaaacgctgaccgccgtattgggccttgccgcccaggggttgctgcgtgaccaggctgtacggacccacggcgcgggcgtgaattttgtccgccaccaggtggttcagtttgagcatgtaggtctggcctaccaccaccgggttatggaaaggttcgccggtcaggccgtcataaagggtactcttccctcccacggtgccgtccttgccgtcaccgatccaggtgaaaccgtccacctttttggcttcggacatgtaattccagatggtttcttcactgatcccgtcgaacaccggggtagccaccttgaagccaagggccctggcagcgatgccgaggtgggcttcaagcacctgccccacattcattcgggaaggcacgcccaaggggttcagaacgatatccaccggagtaccgtccgcgaggaagggcatatcctgttccgggacgattttggcaacgacgcctttgttgccgtggcgaccggccatcttgtcacccacgccgagcttgcgcttggcggcgatatatactttaacttccttcagtccgccgggttcggattcgtccccggattccatctgatccagcctgtgctcccgctcgtcatccagttccgtaaagcggccttcaaacgaagtgatgatttccagaatcttgttgcgaatcgggctgggttcgatttcgatgtggtcgtgaaccagggccagtttgcgcaacagggtcttggtgattttcctgttggccgggatgatgatttcaccggtctgttcattgacgacgtccagcgggattttttcacccagaagaatatcggagagcttcttggtcaactggtcaatgagctgctccttcttctttttatgttcgtcgttgattttcttgaactgctttttcttttccgcgctgtctacgacgaggtcgctgcggtggtggccggagcctgtggaagaaatgcgcacatccatcacgatgccggtgcagccggaggggacacggagtgaggtatctttcacttctgcggccttttcaccgaaaatggcgcggaggaggcgttcttccggagccagttccgtttccgatttgggggtgattttgccgacgaggatgtcgccgggcttcacttccgcgccgatgcggatgacgccgtcatggtccaggtttttcagggcttcatcaccggcgttcgggatatcacgggtgatttcttccgggcccagcttggtgtcacgggcctgaacttcaaactcggagatgtggatggaggtgaaggtgtcttccttcacggttttttcggagatgacaatagcgtcttcgaagttgtagccgttccacggcatataggccaccagaacattgcggccgagagccagttcgccctggtccgtgttcgggccgtccgccagcacgtcgccggttttgattttgtcgccgcggcgcacgatcggacgctggttgatgcaggttccggcattggaacgcatgaacttgcgcaggggatagacgtaaacgccattgtcgcggtccgtgcgcacactgtcgggatcggacaggaatacttccggacgcacgggcagttccccgtctttcgtggtgataatgacttcagccgtggcggaggccacgatgccgtccgcttccgccagaacgacggaacgggagtccctggcgcactttccttcgatgccggttcccacgtatggagattccgctaccatcagaggcacgccttggcgctgcatgttggagcccatcagggcgcggttggcgtcgtcatgttccaggaaggggataagaccggcggcgatggaaacgagctgcttgggagaaacgtccatgtaatgcacgtctgccggatccacttcgatgaattcgcctttttcacgggcggttacgcgggaggtcgtgaagttgccctgttcgtccagcgggttattggcctgggcgatgagatagccttcttcctgatcggcggtgacgtattcgatggtattggtgaccctgccgttttccaccttgcggtaaggcgtttcaatgaatccgaattcattgatgcgggcgtaggtacacatggagttgatcaggccgatgttgggaccttccggcgtttcaatggggcaaatgcgcccgtagtgggaggggtgtacgtcccggacttcgaatccggcccggtcacggttcaggccgccgggccccagggcggaaagacggcgcttgtgcgtcaattccgcgagggggttgatctggtccatgaattgggagagctgggagcggccgaagaagtcgcgcacgacggcgctgagggccttcggattgatgagtttgctgggcgtgacgccttcaatgttctggtcaatgagggtcatgcgttccttgaccaagcgctcggtgcgggcgaggcctacgcggcattgattggccatgagttcgcctacggcacgtacgcggcggctgcccaggtggtcgatgtcgtccaccatgccttcgcccttcttgaggcgcaggaggtatttgagggcggccaggaaatcttccgccgtcatcaggcgctggtccaggctggtgtccagcccgagtttctggttgattttgtagcgccccacgcgggtgaggtcgtatttcttgggatcgtcaaaaagcctcttaagcagggtgcgtgcctgagcggcagtagcgggatctccgggacgcaggcgtttgtagatttccttgagggcggattcttcgtcgtgagcgggatccttcttcagggttttgatcagcacgtcgtcctcgctctggtcaatgacgtcgattttcttgatgccgaactggaggagctggcgaaccacacccatattgagctgttcgaaagccttggcaagaaccaggtccttgtccttgatcgtgtccacagccacaaggttgtgcagatcttcttccgtcatgtcttcgctcaggggaagcgtgcggatgttgtagaactggctgacgatgtcacggtccgttttgaagcccaggtagcgcataaacgtcgtcgcaaggaatttgcggcggcggcggcggcggtcaaggtaaacgtaaagcaggtcgttggtgtcaaactggacctccagccaggagccccggtccgggatgatgcggaaggagtggagcagttttccgttcagatgctgggcgctttcaaagcaaatgcccggggaacggtgcagctgggacacaatgacgcgttcggcgccgttgatgacaaaggtgccgcggttggtcatcatggggagttctcccatatagaccgtttcttccttggactcgttgtcggatttgagcttgaaggtgacctgaagggcggcgctgtaggtttcccccgcgcggatggcctcgtaatcgctcatcttcggctgttcaatgtcataggagacgaagtcgagctcaatgttttcgtcatagctcttgataggaaagatttccttcagaacgccttgtaacccgatgtttttcctggccgcggtagacgtgtcctgttgtagaaaatcgaagtatgattgaagttgaatctcaataaggttcggaggttcgatgacttccttgatattcccgaagtagagtcgctttgacatgggctgctgtggcggagatgttatggtttgcatcctgaaaaacccggatgccgggttgggcggttctttccctgggggacggaaccgactggaagcgttttacgaaataaaaggcctctagtcggtcacgcgggatgtgaagacgaggaagcgcaacaggagaaaaacggcttttctcctgttgcgcgggaagtaaaaagcttacttgacgtctaccttggcgccagcttcttccagcttggccttggcggcgttagcttcgtccttggagacagcttccaggatgacggcgggagtgccttcaaccagtttcttggcgtccaccaggccgaggccggccttcacttcgcggacggctttaattacggcgatcttgttggcgctggcttccgtcaggacgacgttgaattcggtcttttcttcttcagcttcggcaggagcggcggcagctgcggcggcagctacgggagcagcggcggaaacgccccacttttcttccagaagcttgacgaggtcggcagcttccaggatggtaagggtgccgagttcttcagcgattttgttaatatcagccattgtattgttttctagtttggtttcgagtcgcgccaagagccaacttggcatttcagttctccggccggagttccgacaaggaacctgtaggagagtcgggtccgattttcacacatttggctagagtgcaaccggaccgtccggtcaaggggttggtattaggcggcgggttcttcgctgccgccgttttctttgtccacatatgcctgaataactcgggcaagagcggaaccggccgcgttgatagtgccaaggagtttggcaagcaactggtcgcggggaggcagttcgccgatggcgcggatttcgtccgcggaaagaatggctccatccaggatcgccaccttgtattcggctttcttggaagccttggcaaaggtgttgatggccttggcggcgcctgctacgtcggatgcgccggtcacgaaagcggtctggccgacgaggtgttccccaatgtcgggaaggccggcatccgtcagagccgtgcgcatgaagttgttcttggctacgtggcactgagcgccgcaggcggccagggcggaacgcagattggtgaactcaggcacggtgatcgaggtgtagtccacgacgatcaggaacggggaggcgttgacgcgagcagtcaggtcgtcaatgatgatacgcttgtcaggattcatggtgtgctaaatcggttcgggttacagtttggcgatggaagcagtgtcaaccggcagaccggggcacatggcgcatgaaacggtgacggattcgatgtaggcgcccttggcggaagccgggcgggccttgacgacggaatcaatcagggcagcgatgttttcggcgatgctttcgttggagaaagacagcttgcctacagcagcggagatattggcgttcttgtcaaccttgtagtcaacgcggccggcctttacttccttcacagccttggccgtatcgtccgtgacggtaccggttttcgggttgggcatcaggccgcgcggacccagtacacgggcaaccttgcgaacctccgtcatggcgtcgggggtggcaatggccgtatcaaagtcaacaaatcctccctggactttcttgatgagatcttcaaaccccacgaattcggctccggcttcctgggcggccttggcggcatcgccctgagcaaagacgaggacgcggacgtttttacccgtgccgttaggcagggaaacgctgccgcgaaccatctggtcggatttgcgggggtccacagtcaggtggaaggagacggtgacggtcgggtcgaatttcggtgccgggaaggatttcatggtttccacggcttccgtgatgctgtagttcttgttagggataacaagcttggctgcttcttgatatcgcttgctgcgtttggtagacatgtgtgtatttggcagtgcgttcggactggtttaatcctcctgcggtgagtgttacataccttcaacttcaatgcccatctggcgagcctggccggcaagaatgcgggcggcgcgttcagggtctttcgtgttgaggtcagggagtttggtgttgacaacttccatcagcttggccttggaaagggtggcgactttctttttgttcggttcgccggagccggaggcgatgcctgcggctttcttgagaagcacgctgcccgggggctgcttggtgatgaaagaaaatgacttgtccttgtaaaccgtgatgacggtcggcaggagatcgccggcctgcttttgcgtggcggcgttgaactccttgcagaatgccatgatgtttacaccggcctgaccaagtgccggacccacgggcggggaggggttagcggctccggcattgatctggagcttgatgattttggttatttcttttgccatggttttgctttgttagcggaaaaaataaacgggaagggggctgatggggggagacgcaaagaagattcaggctttttccacctgccagtattccaagtccacaggcgtggcacggccaaaaatggagacgctgacacgcagcttgcccttttccgggtcgatttcttcgatggtgccttcctggctctggaacgggccttcgcacacgcgcacagggtcgccgacggcgaattccaccttggggcgggcggcgacggcttccgcatccaacaggggcagaaggtcttccacctcgcgcttgcgcatggggaggggggcgttgcgggagccggcaatgctgatgacaccgtcaatttgctggataaagtaccaaaggtccttgttcagggtgccgtccgcttccagcaggtacatgttggcataaacatacccgggaaagagtttgctgtgacgttccgtttttttgccgttgcgcacttcggaaataagttccgtggggacttccacccggtaaatgaagtcggaaagctcggcgtccttcgccttgcggatgatgcggtcacgaacgctgttttcctgtccggagaggacgtgaaggacataccattgttcgtgaggctctggggtactgggcatgatcggagaaagaagtggggagagtaaaactagattgccaactggatgagatagttgaccacgctgtgaagaaagatgtcgaacgatgcaacaaacgcgccaaggaataccatggcaatcagtacgacgagagtggaaccccagagttcgcgaatttttttgaaacctttcaccttggggtcgctttcccagggccaggtcgtcttcttaagttcgcccttaacttcggcgatgaattgagaaatcttgcgaaacatgcttcaaggtggggtggtgtatttggaaagaagtggcaggtcaggagggactcgaacccccaacttttggttttggagaccaacgctctaccaattgaactactgacctgttggagtctcttctttcgtgggaaatgagggggcctgcggggaggccccctcattaaacctgatgtagattcctctacaagttcctgaggaacttagtcaaggatttcgctgatacgaccagcacccacggtgcggccgccttcgcggatagcgaatcgcatggctttttccatggcgatcggagtgatgagctggacttccaggttgacgttgtcgccgggcatcaccatttccacgccttcgggaagggtgcagcaaccggtcacgtccgttgtacggaagtagaactgcgggcggtagttgttgaagaacggagtgtgacggccgccttcttccttggtcaggacgtaaacttcagccttgaagttcttgtggggcttcacagtgccgggcttgatgattacctggccgcgttcgatgtcttccttcttcaggccgcggagaagcagaccaacgttgtcgccggcctggccttcgtcaagcagcttacggaacatttcgatgtccgtaacggcggttttctgggtatccttgatgccgatgatttccacttcttccatcttcttgatgacgccgcgttcgatacggccggtagccacggtgccgcggccggagatggagaatacgtcttccacaggcatgaggaagggctggtccacaggacgttcgggctgcgggatgtaggagtcaacggcggccataagttccatgatggaatcttcggcagcggcgtcgccttccagagccttaacggcggaacccttgataatgggggtgtcgtcgcccgggaattcgtattcgttgagaagttcgcggatttccatttccacgagttcaagaaggtcgggatcgtcaaccaggtcgcacttgttcatgtaaacgacaatggcgggaacgcccacctggcgggcaaggaggatgtgttcgcgggtctgcggcatcggaccgtcggaagcggcaaccacaaggatggcgccgtccatctgggcagcgccggtgatcatgtttttcacatagtcggcgtgtccggggcagtcaacgtgggcatagtggcggttttccgtttcgtattcaacgtgagccgtggagatggtgatgccgcgttcgcgttcttcgggggcggcgtcaatctggtcatagccgcgtgcttcggcgaaacccttcttagcgagcactgaagtaatggcggcggtaagggaggttttgccgtggtcaacgtgaccgatggtgcccacgttcacgtggggcttgttgcgctggaattgctctttagccataatattatgtttaggtttgggctgctatgggtctagcttgaagatggagcttctggcgggaattgaacccgcgacctcatccttaccaaggatgcgctctacccctgagctacagaagcatagacttcttccgcctttcgctgctcctagagaagtcgtaaatccgcccaaacctgcggttctagcggataaatagcatcctcccgtgttgcctgacgaaaagcggacgctatgttacgtttttagatgcgggatgtcaatgaaaacatgaacattttttcagctttatgccgcaaatacagagggtccatgtataatatatttatcaggaatgtgttgaatgtttggatctgtttaaatcctccgtcaatttaagattggggtcaacgtcttcatccagagagtggaacagtcctctgcgggctttgagacaggtgacataagcgatcatggcggcattatccgtcgtcaggtcgaagtccgggagaaccagttccactttttcacggtcacaggcggttttcaggcgggaacgcagctccctgttgcaggagacgcccccggagatggaaagggtgcggtgaccggaggcgcgcaaggctttcagcgccttgtgaatcaggacgtccgtcacggcccgctggaaagaagcgcagaggtcgcgcagaatttgccggggcaggccgtgaggatcgccgtttttcgtaattttgggcagtgtatagagaacggccgttttcaggccggagaaagatacgttggctgtatgctctttcatcagggcacgggggaaagaaaaggcttccgggtcgccttccgccgccaagcggtcgatttccggccctccgggatagggaaggcctagcattttgcctaccttgtcaaaggcttcccctgctgcgtcgtccagagagcggcccagcaggcggtagttccctacgccgcgcacatccacaaaaagggtgtggcctccggaaacgaccatgcccagatggggaacgggaccgccggggcgtttgaggaagggggaaagcagatggccttccagatgattgacggagacgaagggcctgcccgccgccagagccagagccttggccgtgctgttgcctaccagaagcgcagctaccaggccggggcctcccgtagcgccgaagacgtcaatgtccgcaggagctgttccggcttcgcggcacgcggtccggatgattccgggaagatccgctgaatggttgcgggaagccagttccggcactacgccgccgtgctggcggtgaatggcaatttgggaggagatgacggaggagagtatttccggagctttttcctctccggcagaacgcaggatggcgactgccgtttcatcacaggaggattctattcccagaacggtaagggattccggcatggaggaagaacagggaggggaggttaggatgcctggtggatttgggcaggcttgttgccggtaaccgtttccctggtaatggtaacggtgtccgcatttttcatgctgggcactgtgtacatgacgtccagcatgagggtttcaaagatggaacgcagagcgcgggctcccgtgccgcgtttcatggcttcgacggccatggctttcagggcgtccggcagcacgtccagtttggcgccgtacatggcgagcagtttggaatattgcttgaccagggcatttttgggttccgtaagaaggcggacgagctggctttcatccagcttggagagcggacagaagatgggcaggcgtcccacgaattccggaatcatgccgaaggagaagagatcttccggcatggcctgtgccagtatttcctcttccgagtattccttgcggtcgcgttgttccgtgatggctccgaatcccatctgggtggcgccgaggcgtttgcggatgatgtcttccagcccgacgaaagcgccgcccacaatgaagaggattttttccgtattgacgcggatgtattcctgttgcgggtgcttgcggcctccggtgggaggaacattgcagatggtgccttcaatgattttcagcagagcctgctgcacgccttccccggagacgtccctcgtgacggagacattctgtgttttgcgtccgattttgtcgatttcatccacgtagatgatgccttgttccgctttcgctacgtcaaagttggcagcctggagcaggcgcaggatgatgttttccacatcttcccccacgtaaccggcttccgtcagcgtggtggcgtccacaatgcagaatgggacgttgagcattttcgccagcgttttcgccagcagggtttttcctgagccggtgggtccggccagcaggatgttggatttttcaatttccacatcgtccagggacttgtcgtccagcatgacagcactttggcgcaggcgcatgtagtggttgtacacggctacggaaagcacttttttggcgtagtcctgaccgatgacatactggttgagcgtagcgcacatttcttccggtgtgggcagcgggccttcataggaggccgggctggccgccgtttccctgagcatgtccgcggctgccgctttgcgggcctccgcctggcacatggcgtaagcggagggttccatgttcaggatgccgcggatgaagcgggttgccatcggaaggcctgtgtccttcacaatcatgttgacgcaaatttcaacgcaattgttgcagatgtaaaagtcttccgcaatctggatgagtttgtccaccttgttcccgggcttgccgcagcaggaacaggcaggaagatgaggggtggaaccggacatggtttttcaggtagagagagaaatggcggagggaaagggtcaggccttggtttttttcttgtcgccctggtcatcagagtgatgcgccagaactttatccaccaggccgtaggccacggcttcctcggcagtcatgtagttgtcgcggtcagcatccttttcaatttgcttttccgttttaccggtatgtttggccagaatgccgttgaggcgttttttgaggttgaacatgaagccgatggtgcgttccacatctgaagcggttccctgggcacctccggaaacctggtgaatcattacgtgggagttcggcaggcagaagcgtttgccgggagttcccgcagccagaaggacggaacccatggaggccgctatgcccaggcaatatgtatttacgtcacaagagacgaattgcatcgtatcgtaaatcgcgagacccgccgtgacggatcctccgggggagttgatgtagacgtggatgtcttttttcgggtcaaccatctgaaggaacagaagctgggcaatgacggaattcgccacatcgtcgtcaatagcggagccgatgaagataacgcggtctttcaggagacgggagtaaatgtcaaaggcacgttcgccgcggccgtcctgctccactaccatgggcacatagtaggagtttgcgggggttgatttggaagattggtcttgaaacatgtttatggaagattggatgttgttttttcaatgtacgttacccgtccgaaagatgcaaaacgggggagtcgggcatgtgtgcgccaactccccctggtaaggtgttttgtgcagaggaggggttactgctcgtctaccgttactttggcctcttttgtcaggaagtccagaaccttggctgtcagcaggctcattctgatgccatgcacgcggccttcgcgctggagttcgcgaatgtaggatttgaggttctttttctgctggcgggcctggcgggccacttcgttgtaaagctccatttccgtgacggcaattttttccacctgcgccacttcctgaagcatgaagaagaccttaaggttgcgcttggcctcctgtttggcttcttcccgggcttcctccacaaacttatccatgtccgccggggcgtttccgctgtacatggcctgctgcattttctgctggaggatgccgtacacttcacgttctacgacagcttccggaaggttgaagtcaagcatgtccgccagcttttccgtgatctgatcggccttggcctcatcaatttgcatggctttgcgctgggccaggttttccttcagggcggttttcaattcttccaggtttttgccgggaagaactttttccgcaaaagcatcatccatggccggaagctgtttttcccgtacttctttcacagtggcatggaatacgagttccttgccgcgcagttccgtaattgggaaggtatccggaatggtgacggtgatatccttgctgtcaccggcattcaggccttccagggcggaggcgaagccgggcaggaattgatcgtcttccaccttcatccactggccgtcacggccttccaggaagcctacgggtttgcctacggcttccgctacgggcttgccgtccaacgtggttttgaagtcgataatcgccacgtcgtctttttgggcggcgcggtccacaggggtgaattccgcgatttgttcagccagggagttcagagcttcctctacgtctgcttccgttacttcggaagagggaaccttgacttcgatgcctttgtattccggtaattcaaattcgggaactacggtcatcgtgctggtagcggtgtagttgccctggtcatccagagattgttccggctttccgaagttgagcactttcaatttggggttttcttccagagcggtggagcaggccgtttcaaaaagggtgtccagcagttcttcttcaatttctttcttgaagcgcttttcaatgatggacttgggtgttttgccggggcggaagccgggaagcttggctttggcggcataggaatctacaatggaggcgcggcgcgcagccgtggtttctgcagggatggaagctttcagcgtggctgtgcagtccggttgaatatcaacgttgatttccataaataatacggtcagtgttaattgaaagtggttctgtttcagctccgggatggcggcagcggtcaaaacacgagcggcgataactttaatgagagggtatctggagtgcaagctattgcacaggaatgacacaattgccctcctaagcgcgcacgcgcacgcgatgtaatggaatacagggcaactgtgttctacgcggaatcacgtcttgactatgcaagaggaaaagtcctttatatcccaagcattaagttcagcgctcatgattcgtcccgtttttttgtgtgtttcctttcccttgatagcatgttcggctgttttggcccaggatgaaacttcccttaacagaggcgcctatggttccgtgatgactccggaacaggtaatgcgggaactggggccgggcacggggcttcttcccggtgaccaggcgtatgaggggcggcctgtgaagagcgtttccgtgcggtacagaagcaccggcaagaccgtgtccgaagaccgtctgaaaaatttgctggctacgcagccgggcaccagttattccccggaagtggtcaacaaggacttggaacggttgttggaaagcggtctggtaggcggcaatacaacagtagccgtggagccttccggcgacggcgtggcggtggtgtttgaaatggcggcccagaatctgctgggcggcgtggggttccgcggcaataccgcgttcgacaacagggacctctccgaggaatgcgggctgaaggggggggaagctctcagcgacaaggccctgagcagcgctattgccaagttgcgcacttattaccaggaagctcggtatccggatgtacgtgtttcctatttttaccagaaaacggaacggcccggctttgtggatgtggtcttcgacattaacgaaggaaaaaaggccaatattatcaagattgactttgtgggcaatgaacacatcagcgccaaggatctccgacaggtgatgaaaaccaaggagaagggctggttgacctggattaccaaatccggacgcattgaccgtgaacaagtggaggacgatctggcggaattggtgacttattaccgcaataaaggttatctgcgcgtcaagctggacaaggtggaatattttgacgcaagcaaaggcaatgagcagaagctgacgatgagaattacctttaccgaggggcgccgctacaaggtcaaccaggttgccttcggccccaccaaggtgtttacggcccaggaactgattcctggcctgagcatgtacaacggggatacctattccgcccagaaagtggccgacgacgtgacgatgatccgccgttattacggttcccgggggtatgcggacgcctccgtgcgtccggacattcaggaagtgggcgttgatcccaagacaggttacggacaaatcaacatcgtgtaccatgtgacggaaggcaatccctaccgcgtaggcaatatccgcctgaccgggaataaccgcacgaaggattacgtcatccgccaggaacttcccctccagtccaatgaccccatgaacgccgtggatttggataccgcccagaagcgcctccagaacctgaactattttgacatggtggacgtagcccaggtgggatccacgcggcccggctaccgtgatatcaatatcgaggtggcggaaaaacgtacggggtccctgaatatcggcgtggcattttcctctattgaaagcgtttacctgttcgctggcatcacccagtccaattttgacatgtatgactggtcctctttcgtgggcggcggccagcgtttcgcgattaacgcccgtgtcggttttgaaacgcaggatgccagtatttcctgggtggatccgtggttcctgcaccgcaagctggccttcgggacggaaatcttctacagcaattccacatatttttccgattattacgaccagcagaattatggctttgccatttctctccgcaagccgatcggggaactggattacgtgaaactggaataccgcctggaacaataccgtattgacgccgaagggaacgcccctatcttcttctggcaacaggacggagactacctgcgcagccatgtggaactttcctacaccattgatacccgcgacgcgcagatttttccccgcaagggaggcaaatttgaagtgctggccggttattccggcctgggcggcgatgtgcatacatacaatttcggcgtgaatggctcctattactggaatttgcgcggagacaccattttcagcatcaatgccggtgcggctaccgtggattcctatggcaaccacgatgtgcccatttttgagcgcctctacctcggcgggccatacaacatgcgcggtttccgtttccgggacgtggcgccgtacaatcccgccctgagcggtgatgagacgatgggcggccgttcctccttcttctgccagtttgaatattccattcctgtgattgaagaagtgcgcgtcgcggtgttttatgacatcggttttgtcaacggagattcttttgacttcagcacgtccaaaatagtttccgactacgggatcggtctgcgcctgaacctgcccatcggtccgctggcagtggactatgccattccgattcagaagaacaacgccattgaccgcggaggacaattccagttctatctcaattattcctattaattacgtttgataatttctctaccgtttgacgacatgagtaatttccgcattcttatcctggcgtttctggtggtggtgctggctgttctgggaatgatttatgtgaatatttcttcaagaatggatgtgattcagcaacagcagcagatggcctccgctccggcacctgtcaatccttccccgtatcttccgatgcccacgcaggctcctgcttccgccgttcagccggtggtggtggccgatcctgtagtgagcgaggaactggctcatgtttcggcggagctggaacggatgaagaaggagaatgaagaactgaagaagcgccatgctctggcggaggaagaacgcgatctgttggaacgccagaatatggaaaagggagatccccggctgcaatggcttaatgaaatcaaggatgcggagcaggtgggccgtgtgacggaatactaccgtgacgccaacctggtcctgttccagtccatcggccagcctgacttgaaagtggggcaggaactgggaatccgcagacgcgggagcattttcgtatccctgattatcgacggagttgacccggacgggaaggtgttccagtcctacgtgaagcgtaatacgctttttgataataatgacaaggagcccatcaagccgggggatgaagtcattgttccgcctgcgagctggcaggaaaacatgacggaagaagacaagtccggtatggcttctccctccgcccccgtccccgtggaagctcccaaaccggtgatgattcccatggagccgtgatgcgggtccgtatttagccaagccaagtaaagagaagtgcacctgagagaaagattgcaatcgggcgccgggcccagcctgtcctttgaatttttcccgcccaaaaacgagcaggcagcgtcggccttgtaccagactatccgtgaactggagccttaccgccccagtttcgtcagcgtgacgtatggcgcagggggctccacccgcgagcttacccgcgaagtggtgttgcgcatccagcatgaatcccgtattcctacggttccccaccttacttgcgtagggcatagccgggaggaggtatggaatatcctggaccaatacgcccgggctggagtgcgggccgttcttgcacttcggggagatcctccccggggagcgaaggattacaaccgcgatgcggatatttttcgccatgcggcggatctggtgacgtttatccgtgaatataatgaatccggccgtcacccggatccggatggattcgccataggcgtggctggcttcccggaaggtcatccggccactcccaaccgcctgcgcgagatggatttcctgaaagccaaggtggatgcacgcgcggattatatatgcacccagctgttttttgacaatcattcttttctggattaccgggaacgctgtctgctggccggcatcaaggtgcctatcctggcgggaatcatgcctgtgaccagcctgtccggcatgaaccgcatggcagagctttccggaggcacctgttttccggccaggctgctcaaggcgctgaagcgtgcgggttccaatccggacgctattcaggaagtaggcatccaatacgcctccagccagtgcgccgagctgttggattccgatgtggacggcattcatttttatacgcttaaccagagccgggcaacgcgggagatctacaggaatctgggactgaaggattccctgcagcttttggaacatggcgaagataagtaaaaagctgattgatttggttgggacaacacggtagaaacctcttcaacatattatggatatcaaggatattaaacgggccatggacaatatgccgatgggcgacggaagtgcgtttgcggaaatttccgtcggcccggccaagcatgaacagtttttggatgaacattacggcaaggttgcgctggttgtgttgctatgcgtccttggggctgccggatggattatttataatggcgtgcaggattccatggaaagaaaggcaggcgccgctctggtggccgctatgccggaatccccggcaaccggggaaatttccctggacgaacaggggcttcagcaggtagtggctgactttgacagttcccgcgccgccgtcaccgcctcttaccttcaggccattgccttgtggaacgccagcaaggaggatgaaggcgtggccaaaatgaaagcttttattgattccgctcccacggaggaatggaaagcccaggcttccgttaccctggcctgccgtctgatgaaccgggggaaagcggatgaggcggaagggttgttccgttccgtggtggatgcgggagatcctactttttccggttttgctaccatgtgcctgggagacattgcccgggctaagagagacaatgccgccgcaggcgccttttaccgtgaactggcggagaaatttccgtccagtgcatttgccttgcagagcggaggctacctactgcgcaagagcctgtttgatattcagagtcccgttcgtattgagcccgcagtagaacagaaataatccatgcgggcgtttccgaagttttccggaagatgaacgctttttccatccgcatgtctgtttttttacagtgcatgcggatttccgtattcaggaacgccggaacaggagggtaatgaaaagcctgctgcgcgcgtagctgttatgattccgggaattccgttcaggactgtgacatatttaaacaaatcatcaagggattccgcgcttaccggatgtaaccgggctgccggtgttaatccttattttttatctcatgaacaggcatattaaatcattctggcttcttcccctggtgggaatgacgctttctttcatgccgtcctgcacgacggacagctacgggaacagttccgtaacgcccggcggagccgccgccatcggtgtgggggcgctggctgccggcgctgctattggggcggctgtccagcatgaccgcgacaaggacaggtaccgcaatgactggcgccaccataatcctcctcctccgcctccccgtccgcctcatcgaccccaatggcggaggtaagaagggagcgtgcgtgtaagggcggcgatattttggttcggcagggggccgggaggcgacgcgtttttccggtctgcccctttgctgaaatctcagacccgccgtatgccgcggagcgcccaggtcatgcgttgtctggcgctttccggatcattgaggatagaacccagcaagtcgagaacgggccgagctgctttggggtcgtgcacttggagctgtccggaaaggataaagggggctcccccgcagcagacaaggtaaatgaggatgttcatggggtctcccatgagcacggatccttcctgctgggcttcccgtatggtttccaggagcacaaggggatggcgcgtatggattcctgaaatgaaacggatggccgcctgttcccctgccagggcgtccagaaccagctgggcaatgaattggccgtgacgcagcaggaactccatgacgtctcccaggatggcttccagtttttcaaaggccggaagatgaatgttggcatgggtcctgatgccggtgaacagaggttcgtaccagcgttccagaagctcggtcagaaaagcttcccggttgccgaagtgatagacaaagctccctgtattggtgccggcccgcagggacaggccgcgaacggtaagggcgcgcagcccggattccccgacaatcatggcacccgtattgagcaggtgctctctggtggatttccgtttgggcatgaaggtgaagcttgaacctccatgtgtgccccttatcggcctgcaaggcaaggactcgttatgtctgttgctgtaaaaagcggaaccggggctcatcctctccccggtcccgccgccgaagtcctgaatgaatcaggaggttgctttcaattccttccgccgggaggcaatccagcgggagaagagtttggccgtggccggaatgataagcaggttcaggatggtggctgtcaccagccctccgaactggacgatggccagggggccgagcagttcgcctccgggctggtcaatggcccagatcagcgggagcagccccagcacggtagtcagggaagtcatgatgatggggaccacgcgttccagagaaccttcccgtatggcttccgcgggttccatcccctgatgttccagggcccggtatctgttgagcagaatcaggccgctacggatggcgaagccgatgacggtcacgaatcccacaatggaagccacggaaagaatgggaggaatgtaagttcctccaaacagggaggacagcgtaccgggggaggcaaggaagacggctacgatgccgcccaccaggcacagcggtatgttcaccagagtcagcatggcgcgccggacgcttcccagtgcggaggaaaggagcagcacgatgagcaccatgacgatggcgcccaggacgtaaagccgttgtgatgcggattcccgtgctttgatagtgccgtcatagtctacggtacagcccatggcgttcattaccgggtccaattgttcccgacaggctttcgcgaggtctcccaggttggaattgggggagggattgcaggaaatcatggctttccgcatggtgttgtccctcaggatgaggttggaaacttcctcccggtatacctgtgccacgtcgtccaggcgcacggtttttttattgggggaaatgagttccaggtttttgacatcttccatggacgttttaagtctggggtcaatgcgcaggacaatgttccaatggtcctggtttttgatgacttctcccagtttctgtccgttcatggccgtggaaacctgttccgcagcattcgccatggtcaggccgtaggaagccagggcttcctgattgtattgcacgcgaatggtatccaccataatttcccggttggcgcgtgcatccgctacttccggcatgttctccagaatttccttggctttccgggccgccaggcggagctggggcagctccgtgccgtaaatgttgatggcgatttccgagttggagccggacagagcggaactgatgcgatgggccagcggatagccgatcatggagctggtgccggggatgccgtcaatgcatttcttgatggcggagcgcaattctttctggtctttcttcagatccacgcgcacgagcagctcggaggcgctgacgggttctgcgtgttcgtcgttttccgcgcgtcccgtgcgctgggtgacactgagaacccccggaatctgttcaatatctttcatcactttccgggagatgcgctccgtttcatccagggaagttcccggcaccgtgctgacgaagactgtgtagcaatcctcgttgaacggcggcaggaaactggttccgaacgtggaacccagccacagggccagcagcgtaatggccgtcatgatggcgcagaccgttttggaaaagcgcaggcagaattccaggatgggggcataaatgcgtttaatgaggcgggagctgaaggaatccccgctttccagagtagcggcgtttttgcttttcttgaaccatatgtaacagagaaccggagtaatggtgacagctacaataagagaagaaagcagggccagcatgtaggagatccccaggggccggaaaaactggccttccagaccggacaggaagagcaccggagtgaataccagcaggatgatgacggaggagaaggaaatggagcctacgatttcgctcttggctttcatcagaacctcatacttgctcttgcgcttatctttcggcagggcggcgttcctgttcaggtgcctccaggctatttccacgaagataatggcgttgtccaccacgtctcccacggctacggcaaggccgcccagggtcatgatgttgatggccagcccgaaggcggggaacatcatcatcccgaacaggatggacaggggcatggaaatcagcgtgatgatggccgtgcgaaggttcagcagcgtcaggaagatgacgatcatgaccaccgctccggcaatgaggagggtttccgtgccgttatccagggacatttcaataaaatccgcctgccgataggctgcggtgtgcagtttcattcccttgggaagctggctttggctgaattccctgacggctgcatccacggcctgtgtcagggccagagtattggctcccggcaccttctgcacggaaagcactacggcgtcttcccccataaatccggcatctccccgccgcggcgcaccgtctatcttgacttccgccacatcctggagccggagtattccggaggcatggtccggaaccagggcgcggttgagctgttcaatattggcggtgcgggtatcctgctggatggggagttcctgcccggctacatcctccagataccctgcggggacggaagattgggattcctgaatagccgttttcaggctggaaaggtccaccccggccagtttgagtttgttgggatcataaatcacctggtattccggcagacgcccgcccagcaccgtgacctgccccaccccgggaatggccagcaggcgcgtgcgcagcttgtattccgccagttgcctcatgtccagctgggaggtctccttgtctccagtcagggcgatgagcatgatttcccccgttatggagacgatgggggtcagctccggggatgtcccttccggcagggattcccggactgctccaagacgttccgttacaatctgccgggcctggtagatatctttgttccagtcgaaatccacccatacgaaggaaagcccgctgccggaggaggagcggacgcctttgactccggcggttccgttcatggcggactcaatgggaatggtgatgtattgttccacttcttccgcagtaaggccgggggcttccgtctggatggtgacacgcgggaccttcagttccgggaatacgtccacgggaatgttcttcaccacgaaaatgctgatgattgccagcgcaatcgtcagcaggatcacagtaatcctgttgttcaggcagaatgaaatgagaaagttcatggattctgattgctgaatacctaagattcaagggtttattccaaggaaatccggggtatttgttccttaatcttttattttgtacatcgtttagtgttctccttcgtggaactggccgtccgcgtggaagtgcccggctgcttttttgcttccggcctctccggtgggcaggatgtatttcaattcatacccgcccttggtgacgatagtctgtcccggcatcagtcccttgacgggcgtttttccctgacgggaaggcagtgtttccacttttttcatgacaaatgtatcgtttcccgccttgatgaaaaccacgtcgttcacccctaccttgacgacggcgctgttggggacgggaatgaagccctccgcggcggcatcatgggagtacagatccaaccgggccagctggccggcatgcgtcccttccggtatgcggtccggggtaaaatacagggccctggactgggtggcgggatctacctgttcggccaccctcagggagccgttcagcagttccgtgtttttaccgctggtcagggccagccgggcttttgcataatggacgggatccgtcccataaatggtcgtggtaaattccagatcccctttattggtcatgacgagggcaggcgcgccctgttctccccaggccccttgggtcatgttcacggactgaacggaaccatccgccgctgcgtatatgtaaagaaggttatttttcaatacgcctgactccatcaccagtttcaatttattgttgctggcgttcagggcagcccggaggctgtggatttccgcctctttgaattggatggaagtattcagttcgctgttgcgggtgccgattttttccaactgggcccggcgttccctgagggttccgagttctgctgcggcacggtccagcgcggccctggcctgggaggcgtttccttccatttccacaatatccggggatgccagcgtgtacagcagttcccctttgcgcacttgttgtgcggatttgacgttgaatgtcacgcgccctgcggcgggaagggcgtatgtggttaccgcatggggaggaatgaccatctgtccgtgaagggttttcgccgctccgtgggaggtttcctccactttctcaaagcgcatgtccagagaatggcgcgctttttcatccacatgcacgggaatcatatcccccggttggctggaatttttttccgcagactcttcgcgttcatggtcgcccgtgcatgcttccccttccgcgtgctggtgaccttccagttcatggtcgcctgtgcagacggctccgtccgcatgcctgtgttcttcgtgggcgtggccctgagtacaggtttcccctgccttgtgctgatggtcgtcatggccgtgatccgccgtgcaggcggaaccgtcctcgtgtttgtgttccgcaggggcaggctgtcctccgcgtgcggaatggagacagaaagcaggagccagtcccagcatgatggaaaaataaagatgtttcatattcattaaagatggtggagggttgatgtggattaaaggttggcgtgggtgaggtagcggagctgggcctgaacggccagaagcttgtccagattgtccaggaaagccaggcggctttcgtaaagctggtggcggttttccgccagttccagcagggatgcttccccaatgccgtgcagcttttccatgatccggacggaggcggcgaaggattccatgcgctggagttccgtgcggcagtggcggagcgccatctgctggcttgcgtcaagctggcgggcgttgaataattccgttttccaaagctggatggtttcctgtctggacaagtcccgtgtgcctcgggcttccgcaatagccttgcggttgcggttccaaaggggaagattgaaccctatttctccgcctacttccttttctccttcgtcgcgggtgaaggaggggccgagctccagttccgggtactgctagcggatttccgttttgaataatgtctccgtggtggcgtaagtcgccagttgtgccttgatttttggagaggcggtcaaggctgaagggccgggagccggtacggcggcgggaagctggaaactcggtttcgtcaggaaaccgagtttccgcaccgcagaaggatgcaggcccatcagcttgacgagttccatcttctgctccaattccgtttccgtcacggtttggagttcccggatagcgtcattcatccgctgggaggctacctgccgagaggaaaaatccacttcccccgcgccgataagctgttcaatcatgccgttttcccgtcggatggcatccagccgttcccggatgaccgtcttgcggcgctgggtaacggccagtttgctccatgcctggtccagggaactgagaaaatccagttcagcctggcggagagtccagaagtcggcctccttgtattgttccgccacttttttttccagggcggggaggccggttacgggaatggtgaagcccaggctgccggacatgttgaccgtattttcctggaggacttgttcaatatcccaggaaaaggagggatcgttccaccagcccgattgcctggctacttcattgctggaagccagtttcagccgggctttgttcagatccggattcatgaccaggccgatctggcgagcctggttctgagtgattgaggtaggggaatctacgcgggacgcctctttccaggaggcttcctccgcgttcaggtcgataggcgcgctgtggtagacgctgcatgagctgagcagggctgccaggcctattccggcgaagaatggtgtggatttcatgatggaaaagataataaaaacagttcggtccaatcaggtttggacaatgcggcgaataattccgcggaaacaaataaaagcggccgccgtattaaaggcagcgtaccgcaggaaacgcccttaaggacgtttctgaaaaagagccgttaaatcagcaggggaagttgaaagccttcatgcgtcggaccggtgttcctgaaggggtcagggggaaccggtgttgcggaatccgatgtttggcttgttaaaagaagaggccgggccagatggtggaaatccggcaatgtctgccagatgacataaggctggggcagaggtgcatgaggaacgggaaccgtcagatcattaatctccagctgccggtgttcgcagaggtgcccggccaaagggctggaagagccggtgcggggcacatcgtccccgtggcattcgcagggggcggcatcctgatggcaggaacaggaaaaaatgaaaatttcttcatggcacgggcacacggaaaccatacccgttccgcctacgacgaccagcagaagggtgagcagcatgatgccggtgcgcaatgctctaaccatggtatgccgcgaatcctagaaaggagccgtgaaagcgtcaagagcaaaagtggcggatgtctgaaccctgaaggaaaggccgttatttttccgccgctttgcggagcaggtccacagtgtgttcaaaagctacgccgcggacatcaatgatccgggagttttccgcgattgctccggtgatttcctcccggaatttaccggactgttcttccgtgagcaggtttttggagctcagggagcgcgtgatgagctggaggacgtaccctgtttccacgaaagactggcgtcccacggctttcttcatggcttccatgaattccggggcatgttcgggcggcaggccggccacggccttttcataagcacggatgaaggaatccaccggggctttggaaacttccgtcttggtgaggtcaaagctggattgataagcgagagctccttcttccgccagttgaagggcgtttttcccgaatttgttgacggcagtcatatccgctcctttttccagcagcagggccgccacctggaaattgccgcgcatggctgccagcatgaggggcgtaaagccgttgccctcccggttgttgatgtcagcgttcctttcaatcagcatgtcggacaggcggtccagcccgctccaggaagcccagtgcagcgcggtccacccgtccttgtccttccggtcgatttccacgcgggggtcttccagaagccggtccagataaggggcccgagtggcttccagcttcagcgtggtctcaatgttgttgtagttggcgtagcatacccacatgacaggagttctgccatggggatccgtcatgttgacaaaagcctttccttctgccgcagccagttcttccccttccttcagggtttgttcgaattccttcattcccttgactcgggcttccttctcctcctgttcggaggaagcgttgacttctttggcctccgctttcttcattacggtgataaggtccagggccgggttgggatctccggagaaagatttggagaccaacaggctgagaccgccgaggagggagctgaaagctaccaggatgagggaatccacaatgatgttgcgcgtgtgctggttcatggtctcgtaaggtcaggagttggcttccgtaagttcttccgccgtcagggcgggatccgtttccgcttcaatggcgctgatgggtggcgatgccgcgtcttcctcgggatggtccgaggtgatggtcctgcgggtcatgataatggcgatggggctgattacggccatggccaggtaaatggtccacatgaattccggggagtcccagaagccgatgtgcccggtatccatcttggcgcagatgccgtcatagcagaggtaggcgacgagcaggccgccgatgatgccattgatgggtttggcgatgaacatgggaagcgccgccagagacatgtaggaagccactttgtctttcggagctacccgcgccacatattcggagaagcggggagagaagagcagttccccgaatgcgaataccaagatctgcgccacaatggctaccagatacgcctgggagcgcgtttcgatgccgggcaccaggtagtaccattcaatgggaatggccatgaaaacgagagagaaagcggagatggacatgcccgcaatcatgaggccaacggtagagaagcggcccagcaccggaatgagcaggatgaggccggagacgatgatggccgggttgacggcattgatggagcctatggcgaaatcgtcatatagcgtccgcacgtagtatttgggcatcaccaggaattgcagcgtgaaaacaatgcgcacgcccatggtcagcaccaggaagaggataagtttgcggaaggcggattccttccatacctccatgaagagctggagaggtctgcggaggggggcattgatgttcgcctcccgttcgctgggttccgcgtagttgtcttcattaataaaacgggtggtgatgcagcccagcagcaccatcagcgttccgaagttgatgatccagtacccgccgtccacggcgccgaagtgcttgcggaaaaattcaatcaggaacacgttcgcaatgacggcggaaatgttcatcagcaggtagtagatattgaagcccgtggaacgcgctttcagcggggtgaagcgccggatggaagtctggatgacgggggacatgaacgccgtgccgaaggacataatcagaatgcccgccatgacggccagccttccggagtccacggtcgggctgaggtccggaccgaagcccatgataaggcgcccggcaatgaggatgatgaagccgattaggtaagtgcgccgtatgccgatgatgtcgcagatggaacccaccgcgaagacgaaggcggagatgaaaagggtgtacaggcctacccagagggcggcgtccgcatcgttgaagctgcaatagtccgtcaggtagaggacgaataccgtgatcatggaaaaataggccattccgtcgaagaactggacgacgttggtaagccagaaatccttggatacggttttcagtattttgaattccgaaaaatatttgaggatggggtttgcggactcattcatggagagatggaagcggtaaggaaaagttgacgacggtgaaagagtgggttacacgcatccccgtttcaagatttttttctcccgaaggccggtttgaccggaaaaatgcgcttcaccgccaggaaacccccctctatctgggcaaaatacgccggaagcctgccacgtggcaccatgacagcgctttcaggcattgttccacagccatggcgtccgaaggcagcacgggccacagcccggcttccttcagccctgatttggctatttccgccgctttccattcgcggaactgggtgggaagggcggagaaagtgaaaaaggcccagcaggccagcccgatggccagcgcgatctggaatttcaacagtccggccgccagcattcccagcaggataagagctgtgaaaaagggaatcatcgtggcgcgcgcagaggcggttttgcgggcttttgccgcctccgggtcttcccggaccaggctgctcatggcccaggtatgggctacgcaggccagccggcctgcggtcaccttgccttcccatgccggaggaaggctgatgaatccgttttcatccactccgggaaaccgggctctctccagtttccgctggcgtttttccgcaccgtccaggcggtggattaatcccgccgggccggggaaaccgggcagttcccgggattcgtaggtgcgcaggggaatgatgcctttggtgaaacgcagcgcggcaatgacaccgagcacgaccacggaaaggaaaatcactactgcgaatagcatagacggttttttctcatatgcccgtgtgtccgtcaatctctccggctggcatgaagccgtccttcccggccagcagccgggtgcggatgcggacatcgtcttttccttcttttcccgcccggaacgcttggaaaacggtgggatggcgcttatgtcggaatgatctgcggttccgggtgttcctctgggcgggcacaacattccggcatggattttcttcatgtcggaggcgctggatttgggttgattttccggcgtttttcatgtaatggctgaccgcaatggtccatattcgggaatgcatgaggaggtggctgccgtttgtcataatggcggcttccctgggtgtgtctcccgcccaggatgtggcgagccccgatgccgcggatctggatttggacctggtcaaactgaaaagtggccccaagggcagacagagggaggccatgaggaaggtcctcctgcttgtgcatctgaagcaaaaggaaacgtggctggcggaatccacgggggatgaggccgtgcatctggcggcggagatttccttccgccggtatttggcttcagtagatatggacggatgcccggaggaattcaggcgcgctttcctgcggtatgcaaagctcctgaattcctttgaagaaaaagatttgaacagtgtcgcggattttcctgcggtccctttgcaggctgccggaagggaactgttccgggtgttgcttacttaccgtctggaaccggagcatctgctggaggaaatgaaagcgatggtggatgaggaaattgaggggaaagaggagctgtctgcaggacagatgatggatattgtccggggaatgcgggaagccctgcaatccggaagccgcccctttccagcggaaaggcctccggaagacagggtttccgggatgtagcggcttttcatggatggcatgccggtaccgtgaggaatcttgtggaggcatgccggaagtccgctccggctattccggaaggaaaatggattaagacggctgtacgtcagggtttccaggcggcggccatcagagtctggaaatggggcgggtccggctccctgtccacaatatccgtgtggatgttccggaatcccgcttccttcagcatgctttccagggcggcgggcgtgaagcccagccagcggtccgcgtaaagttcacgggcttcctcctgtccatgctggagcagatccagcaccaccaggcaaccgccggatttcaggatatcccacgcagcttccagcgctttggacggtttttgcgcatggtgcagggcctggctgagcagggccagatccaccgtgccgggtttaatgggcggcgcttcgatgtcgcccaggcggtattccagattgtccagcccgtgtttgcgcgccagctcctgccccagctccaccatgctgggggagttgtccacggcgatcacctgtttggcgctgggggagatgagctgggaaacgaaaccttccccggctcccaggtccgccactacgtcatagttcagaatgcggaggagagctccggccagcgctttccaggaacggcctggcgcgtagttcttgcccagacggcacactacttcgtcaaaataggcctgggtgcggtttttgcgcttgtccaggataacctgaagggcttttttatccgtttccgcctccggcaattcctcgcaggctttcagggctacgttgtgcagatcgcctgccagggaaagagtgtaaaagacgtttttgccggaacgggcgtcctccaccaccccttcctgccggagctgggccagctgggtggagatgcggctttgccccatgccgagaatttcctgaagttccgcgacgctcagggattcttcattcagaacgttgatgatgcgcaggcgggtgggatctgccaggagtttgagcgtttttagggttgacttcatagcggaataatatatcaacacatcgagatttatcgatatgagtagaaacacccctcacatctttacgtcggaatccgttggagaaggccatccggacaaggtggccgactacatttccgactctattttagacgcctgcctggctcaagacaaaactagccgcgttgcatgtgaaacgttggtgaagagcaatatggtcatcattgccggagagctgacgaccaaagcggtgatcgatccggaaaaaatcgcccgccaggccattcgggagatcgggtactgcaacaggcaggacgacgacgttttccatgcggataccgtctttttcacgaatctgctcacggaacagtccccggatattgcccagggggtggacgcccgggaggcggagggcaagggccatgcggagcagggcgccggagaccagggcattatgttcggcttcgcaacgaatgagacgccggagctacttccggcccccatcgtgtttgcgcacaaactgctcattgagctggccaggaggcgcaaacgcgggcatgtggactggctgcgtccggactgcaagtcccaggtggctgtggcctatgacgaagacgggcgtcccgcgcatattgaaaacgtagttatttccacccagcacacggaagacgtggaccatgacacgatttactcatattgcgtcaaactcattaaaaatgtgcttcctgcggagcttctggataagaggacggaatatttcatcaaccccaccgggaaattcgtcgtgggcggtccccacggggattccggcctgacgggccgcaaaattattgtggacacgtacggcggcatgggacgccacggcggcggagccttttccggaaaagacccgtccaaggtggaccgttccgccgcgtatatgtgccgctgggttgccaagcacattgtggctgccggactggcggataaatgtgaattgcaggtggcttacgccatcggctaccccgctccggtttccatccgggtggatacgttcggtaccgggaaggtggaggaaatatccattgaaaatgcgctggaaaacatcttttccttcaagcctgcggatatggtggaacagctgaacctgcttcggcctatttaccggaagacgacgcactacgggcatttcaccaatccggagctgccctgggaacagctggacgaaacgcgcctggcctccctgaaacaacttcttcattaattcctacgacaacgcttacagacatgttttcagaaacggaacaatacaaggtgcgcgatatcggcctggcggatttcggacgcagggaactggatattgcggagcatgagatgcccggcctgatggccgtgcgtgaaaagtacgctgcagccaggcccctggagggtgtgcgcatcatgggctccctgcacatgacggtgcagacggccgtgctgatagaaacgctgacggctctgggcgcttccgtccgctgggcgagctgcaacattttctccacccaggaccacgccgccgccgccatcgccaaatccggcacccccgtcttcgcctggaagggggaaacgttgcgggaatactgggactgcacgtggaaggccatgaactttccggacgggctggggccgcagctgattgtggacgacggcggagacgctaccctgcttatccaccgcgggtatgaaatggaggaaggctctgactgggtggataccccgtcggaatcggaagaagaggaagtcgtcaaggccctgttgaaaaaaattgccgcggcgactccgggcattttccatcgctggcttcccgagctgaagggcgtttccgaggaaacgaccaccggcgtgcaccgcctgtaccagatgcaggccgcttaccgtctgctgattccggccatcaacgtaaacgattccgtaaccaagtccaagtttgacaacctgtacggctgccgtgagtcccttgtggacggcatcaagcgggccacggacgtgatggttgccggaaaggtggccgtcgtctgcggctacggggacgtaggcaaaggctgcgcccagtccctgcgcagcatgggagcccaggtggtcgtgacggaaatagaccccatctgcgctcttcaggcagccatggaaggttaccgcgtactgacggtggaagacacgctgggctgggcggatatttacgtgaccactacgggaaactgcaacatcatccgcatcgaacacatggaaaaaatgaaggaccaggccattgtctgcaacatcggccacttcgacaatgaaatccaggtacacaagctccagacgtatcccggcatcaggcatcttaacatcaagccgcaggtggaccgatacacgttcccgtccggcaacagcctgtatcttctggcggaaggccgcctggtcaacctgggctgcgctacgggtcatcccagcttcgtgatgtccaacagcttcgccaaccaggtgctggcccagctggaactgtggaatacccgtaaagaccgttccgtgggcgtggaagtgctgcccaaggtgctggatgaggaagtggcgcggctgcacctcgccaagatagggtgcaagctgactgtcctgcgtccggagcaggcggactacatcggcgttccggtggaaggtccttacaagccggacttttacaggtattaaccttgtcaaggttttcttttcctggccgttccgcgcaggcctgtccggcggaacggcttttttgttttcccgatgatggagggaagcaggatgacggtacgtttattttttttcctgttttttatgcaggttccctgctgttagtgaaaaaaaggaagactttttatccggtctttaatgttcaaatacctttgcagcaggcaaaacgggagcaatcttggaatgctgaccagccagagcctcggcctgcattgcagaatgttccaaaaccatttgagtttggtaagaaggctgttatcgaatgaagcataggggaagagcaggagccttctctgttccgcctgaatcagcctcatcaggcgatcggcggcctggtatgttatttccccggacttatgctttccgtatacctctttcatgatcattatccaggttgttatcaggaattccgatctcttgatcaggattgtcctggggttcccgctcttaaaattgcagatattactgttgtgtctccgatagtacgaacaccgtttgccggatgcgaccatgcctgattttttcaaataggcgcgcatggacagcattgtatcgtccgcaatgccgggccctgaaggcaaatattcgaagtcgctgaacaaagacctgtggtacatggcatttccgccaaaacagctgtaaacatgggaaatgtcaaaaatacattccctgtagggtttgacgacgacggaatctgaatctggcaacatgcgtccataagcgggttgtccatcttcatcgatttcattataagaatggcagtaaaccagatgaccgggatatttttccgccagagatgccaacgaggagatcctgtcttcccgtgcgatgtcatcgccgtcaaacttgataatccattccccccgggacaaatgaacggcacattgcaaattccctgcaattccccggttgctttcgttacggtggagaataatacgccgtccttctccctctttttccaccatttcttccaggcattcaaaagaaccgtcctgagaaaaatcgtccgaaataattatttcccattctcctggataatcctgttttaaaatagcccggaactgttccttgataaaacgtttctgattgtaacaaagaagaatggctgaaatcatgaaatcgaataaacagtttaagtttttttaaactgtctaaaaataacgaattccaaattcgattggggaattccaaatccgctgtaattaaaaagagattgcgtgcggttgtttctgcatgacaggagagcctcttcgcagaaaggaaataaaactgatgatcaataattttctttgaaatacggactttccggcaggtatggatgtttctgccggaatgggaattgatggggttacccggatggaatcatgaagacggaagattccggttattggggaagcttattttcagaagttcctttctttcaaaatttaaccttgactccggatttggaatccgtgtaatatgccccgcactctttttactgtgcgtgcactcagagagcaaatccctttttttcaataatttatgttgaagggtacggtttgtttctcaacatcaaacggccatggatacttcttcccggaaaacgtctcttgttgtattgttcaaccatcagtatgaacgtaacattccggtaatcagagagctttattcaagacgcttttccgggttgcttcaattaatgccctactacaagggagatgcccctgacgtatgttccgtcttcgggaattctttccagttctataattatattttgcagtccagggaaagaatcaggcagttggagggcgattattttcttattatcggagacgatcttcttttaaatcccaggtttgacgaattttcaacgccatccctgctgggaatccatggggaggatacgtgttaccttgacggttttgtggacgtttctctgccggtgtgttaccggggaacggcggaagcccaccatttttccataacccctcccggtattgatgcggaaagcgtcaacaggaacgttccgtcctatgaggaggccaggcggattttaaaatccaggaacctcatgcggcatgatgaattgtcgcgcgtacgcatgtttctgcccaaatggagccccggggggattcatgcgaattggaaagtgttgaagggcagggtatggcatttgctgaattactggaagcaccggattaaaaaataccggtattcctatcctgtcgttttcggatattcggacattgtctgcattccgaaagggaaattagacgatttctgccgtatccttgaagtgttctccgcatggaacatgtttgtggagctggctattcccacggcgttgcagcttcttcccggaacaaagctgtctacgctggaggacacgcagtacaagtcgggaaacgtctggtttccccaggatccggaacactttgaagccatgaatgccgtcattgacgggctcgtgtcctcttccggaggagacctcggcaagctgcttgcctcctttccggaggaatacctgtatctccatcccgtgaaattgtcccgtttcgccagatagtggcgtccataaattgtttttttatcccatgatgaaatatgctgtgatcggagccggggtttccggattgtccatggccggaatgttgctgaagaaagggcatgaggtagtcgtttatgagagggactcccggcccggcggcctgattaaatgcacggaagtacaggggaacctgtatcatcgtgtgggaggccatgtgttcaattcccggcggcaggaagtgctggactggttttggtcccggtttgacagggagcgcgattttgtttccgcccggagacgggctgttatttccctggagggcggggctgtggtggattatcccattgagaaccacctcgaccagtttcctgaggccgtccgttcctccatcgtccatgagctgctggaactttacaggaatcctcccgcggagccccgctccctgggtgagttttttctgaaccgtttcggaaaaaccctgaacagcctttattttacgccgtacaataacaaagtgtggaggcaggatatcagccaaattgccatggattggctggaagacaagcttcccatgccgagcgtggcggaaatcctgttgaacaatattgggcacatcaatgaaagcgccatggtgcacagttctttcttttatgcgaaaaacggcggttcccagtttctggcggatacgctggctcgcggccttaaggtcaggtatcggcaggaagctgtaaatatcctcccgaaggacgggaaatggctcgtacagggagaattgtttgacagagttgtctttacggggaatgtcaggcagcttggggattgttttccctgcatggatgaattgcgcccgtttttcccccggatttcagaattgcgctctcacggaaccacttccgtgctttgccggatttcccccaatgattacagctggatttacatgccctctccatcccaccgttctcaccggatcatttgcacggggaatttttccagaaataataataacggagacatcaccaccgcgactattgaattttccgagcaaatgacggaaggggaaatcagtcgccagctggagcttattcccttttcccctgtgtatctggcccatcactgggaagaatatacctatcccgttcaggatgtttccagccgaaccctcatacgggaactaaaggagtgcctggaaccgaaaggcatttatctattaggccgttttgcggagtgggaatactacaatatggatgcggccatgggggcggcccttgatttggataaaaggctggctgcggagcagatgacacggggataagtcaaattctggacattgtggtgtatttgaacgggggattgtaaatccgcctgtttttaaaaaagtttggatgtagttataaaaaaataactataaataacttatcgtgttgaatggttttttggtaattaaaaaaatcctgtttcaatccgtggttccatgcacggagatgattctccgttaaagttttccattgacagcggatttacaactcgttataggtgcggacgcagaagatgtgttcccgtttttagggacatggtttccaccggaatctgggagtatggctatccgttattgttctttcgcgacccgcggctatcatttgcggcaatggatgcagatgatgagcctgaggctggcggattcctcagtggagttgtcctgttggaatcttaatcgcctggaaagggaaggaatcagggaggctattccatggtttgacccgaatttacagggtgccgggttttgggtatggaaacccttcatcattctcaaggagctggaacatttggaggaaggggattacctgctttatacggatgcggggcgcccgccggggaggcttttccatcattccttggagccgtttgtccaatggctccgggagaaggggcaggatatgatgccgggcgtgaatatttcctattatacgggaggccttacgcggtggtgcaagcagagcgtttttgatgaattgaagctggatagcgggtcttttgaacaggctcccctgattcagggctccttccttttcttgaaaaaatcggaacaaagcctccgaattctccgtgaatggatggatttgtgccgtcagttcaaattggtgtcttctgccactacggaagaagagagccgttgccgcgataattttgtagctcatacgcacgatcagacgctgctgtctctcgtggcggcgcaacatcatctggactgcctgtattccgggaagggcgtcattcatctggaaggccgccgggcgtttgagcggcatcccggttttgacgacaaagacccggactggtttttggaagagcttggcgcaaagaaagcggagcatcccttaatgcccgtgctttgctgcatgcaacaggcgtttttcctgtatgaaaaagccatgaataaattgatgaagctggcgggcttgagacccctccgcgggttttacggttgatggacggttgtgtgcggaaggggagtttgcctgtttcggcctccgtgacggatctctccggcctgctatggacaaaaataaaaaagcgccggaaaaaccggcgcttggaaaggtagtttcccgtgtggcttttaccaggaagcgtcgaatttggggataggcgttcctttgcctccggggctgttttccggaactttataggttttgcgcagttcgtggtaacgcttcttgagctgttccaccgtagtcttgtaggcaggatcgtcaatgacgtttttcatttgcatgggatcctttttcatgtcaaagagcatccattcgccgctggtccagatgtaggaaagcgtgtagcggtccgtccggatgccgtcgtggcgcggggcgttgtgttcgccgggattttcgtaaaaacagtagtaaatggcatccctccagttgtcgggagttttgcccgtgaaagcggtgggaagcagggatacgccctggaaggtattcatgttttccggggtgtccgcccctgccgcagaaacgatggtgggagcgtagtcgatattctgcaccatggtgttgttgcggatgcccgcgggaattttgccgggccatctcatgatgaggggcatgcggagggattcttcaaaaatccagcgcttgtcgtacatgccgtgttctcccatgtagaacccctggtctccgcagtagatgaccagcgtgtctttcgcaatcccctctttgtccagatattccataaggcggccgatgctgtcgtccacggacagaaggcatcccagataatcctccatgtaggcatgccacttccattccgcaaacgctttcgggtccttcagttttccggatttcatgccgtccaccagggatttggtgcgcttggcgtaatagtccgtccaggttttcttttcttccggagtcatgcggttcaactcgcccaggtcccagccgtaaccgggggaaacgatgcttttgcgcatttcttccggaacctggtccttaagcactttgaggtcggaataaatcgccatgtgattggcgactgtctgctggtttttcttcaggaattccggacggttggcatagtcgtcatggaagttggcgggcagcgtcatgctggaagtgtccaccttgcccaggtggcgcagagcagggcaccaggcgcggtggggagccttgtggcccacaacgagcaggaaaggcttgttcttgtcccggttttccagccactggatggatttgtccgtgaccacgtccgtggcatatccgggaaaacgctttgtctggcgtttgccgtccgacttgaggctgataaagtccggattgtagtagctgccctggccggggaagatttcccacgtgtcgaacccggtggggtccgattctaggtgccatttgccgaaaaggcccgtctggtatccggccttctgcagcattttcgggtaagtgggctgggagccgtccagcggtctttgtccgttgaagacaaagccgttcatgtgggaatgcctgccggtcaggatgcaggcgcgggaggggccgcacagggagttggcgcagtagctgcggtcaaaaaccatgccttggcgtcccagtttgttgaaattgggcagggccacgggggaatcattattgccggtgcccagcgtctggtaggcgtggtcgtccgtaatgataaagaggatattcggttttttattttcctcagccttggtttgagctgagagaggagctgccgccagcagggccagagttccggcgatgatggttttcaaaggtctcatattgcctggaggatataggatgacggcgccgtgtcaatgtcataggattccttttgccgggattctgcgttatggtattcttgccccatgctttcctctgctctggaagacacgctgcgtttgttcggcaaggagcggttccgtcccatgcagagggagcttgtggagtgcgcgctggagggccgttcctgcatcggtattttgcctacgggttccggcaagagcctttgctatcagattccggcggttctgggaaatggggtgacggttgtggtttctccgttgattgccctgatgcgcgaccaggtggcggggctggaaaaactgggcgtggccgccgccaggtatgattcgaccctggcggaagaagataaggccgccctgatggacagattgaagtccggaggcgtccgccttctgtttgccgctccggagtctctggaatccccgtggattcagcaggtcatggagcttgttccccccggcttgttcgtggtggatgaggctcattgcctttcggaatgggggcacagtttccgtccggattatctggggctgcccgtttttttcagaaagcacgggttccgcagcgtcatggcgttgacggccacggctacggagcaggtgtgtcgcgatctggccggcctgtttggcgtgagcgatgaatgtattttccgggctgcgccgtaccgtgcgaatatcttccgccaggtggaaacgttgaaggatcaggataaaaccgcgcggctggttgaattgttgaaagagggaggccgccgtcctgccgtggtgtacacgcggacccgcaaagatgcggaaaacctttcctacgaattgggaaaagccggtttctccgtcaagtcctaccatgcgggcatgcccccggagacgagggggctggttcaggatgagtttctggcaggtacggcggacgtgctggtggcgacgattgccttcggcatggggattgacaagccggacgtgcgttccgtggtgcattaccatccccccgccagtctggaggcgtatgttcaggaatccggccgtgcgggacgcgacggccttccttccttcagcctggtgatgttgtccgcccgcgacagcgtggccgtagtcaaccggctgcatgcggcggagccggaccggcacggcatgaaagggctggtatccctgttgtcccgcaggggggagcacattgtttccctgtatgaggcttcctccgtttatgatttgccggatgtggcggtggaccggatgctgtttgacttgaaacgttccggttccgtacgggagaaggggacggggttcaagtattacagggtgcgccctctgttccggatggaggaaattctgtgcggccgcggcggggaggaatgcgcccggctgcaatggatggatatgcgccagcagggagaggtggaggatctggctgtggaatggggaatttcatgggaagaagccgccgcctggcttggtgacctggctctttccggggaatggaaagtggagctgcgccaggcagcccttcatctgtattcggaaggatttgacgcggaagaggctgcggaggaatttgagcagtatttttccagatcccggctgaacgggctggaacgctggaaaacctgcgtttctacgctgacgtcttccgcctgcctgaatagaagcctggatgcctatttcggtttccgggacctgtccgggccttgcgggcattgtcctgcgtgctgcgggatgttgcctgcggccatggaagaagaggaacttcccccgttaccggaagagctgcgctccgccgtcatggagctggcggggcagaggaagcccgcgctggcccgcccttcccagttggcgcgctttttgctgggactggcttctcccgcggccatgcgcgcccggttgtggagccatcctctctatggggcgctggcggacaggaaatgggaggatgtgtggattgaggcgcatgccctgtcgggtagttagaggccggtttttccgccttgggcggcttcataggcggcaataatgcgtttgcaggaattttccgcatgcagcagggaacaccaatagcgggatatttcctccgggttgcgttttccggagtcccaggcgcggatttcttccaaaagcgccccggagaggctttccggagaatcgtccgggctgagtgtgcctgaatcatgggaaacgtaccattgcaggcagttcagctggggtgtgaggcgaggccctacgacagaggccccggcgcacagcgcttctgcggaggcaatgtgagaaccttcataacgggaggaacaaagacaaattttagattttgcataaactttgataagtttctgattgggtattattccatttaaatggatgtaattttgatgttgggggggtaattgttggtgccattcgtgcaggaagggtggtattctcccataaatttcaacaatccacggggagggacttttgttcacgaatatttccagtgcttgcatcagaagatttgtgtttttttggaaacaatcgtcccaacgacccacagcaacaattaaattgtgttttggctgtacaggattcagagtatgttcagaagagatcgggttgggaataagagcaagttttttacatatctgtttcccataaagccattgacggtctaggatggaaagtaaggcagcaggagatggaaaggaaataagatttgccattttcaagtgtttccttctcccccagtccaaagctccgaaggtatgatttttgatgatgtggagacaggcaaaaagagggccctttaaatttcctcttttatttttctccctattccaaatttggagtgtaagtgttttccaatagcgccaagggtaaaatagcccggaagtatccatatacactaccagaaagattcccgcgtcatggatggctctggcgatgggaaggtatttgcccattccccaggcgtacaggatcactccgtcaatacccagggatttccaccaggctgcatctttcaggttggcgtattccgtgcggatgaggtcgggatcatctccttcctgggcaggtgtgggcatgatggccctgctttccaccccgattctctgaaaggccttgcagaaagcgcctgaatcgcgggaaaagaaagtatggtctcccttgaaggacaccggagtgcatgtgtaccatttcatgatgttggtggggtggaagatgaatggaaaacgcggagctcgccaagaagggcttccatggaccggagccatgcggcgggggagtatgtggaggacaaaagttgttgcccgtgcgcgcccatggccggccagcgttcttcttgcttcagggcggtgtgcagcgtctccgccagggattccgcggaaggttcctgtgcaatccagccattcctgccgtgggtgatgagctccggcaggccgccgttcggggtaacaatgacgggcgtgccgtggagccatgattccaggacaaccataccgaaggtttcctcccagagggagggcgctacggagaggccgcaggcggcgcggacggctccttgttcctcatggggaatgaacccggtcaggcggatggattcaagatggcgggaagagatataacgctccagttctccgcgcagggggccgtctcccatcaggtagagaatgcgaccggggggggataggagttcccacgcctgaaccagttgcaggactcctttttcctgcgtcaggcgtccggcgtaaaggacgtcccggcggggcgggtcggcggcaggggcggggttttgccggatgaaatgtggaataaccctgattttatcctccggtattccggtttggatgagaagttcccgctggcgccggctgatggcaatgtaggaggaaaagcggctccaggctcccatgcggcgcgttttatacaggacggcggcggccagggatgagtacgcggcgtttttcctccaacaggcgtgcatgatgccgggaaaatagttgccgtcttggcaggaaaagcagggcgccccgtcccggtaaagtactccgttgaggcagccggagcggtaattgtgcatgtagtggatgacgggagcgggttgatgcagggccagttcatagacgcagggggacatggccgggaacgtattgtggatgatccatgcgtcatagcggttttcacgcaggcattcgcgcagtttttgctccacgtccctgttgtggagcaaataacccattttcgtcagggcgccgtgggggctatggaacagctcctccgttgaatagacaaagggtgtgacatccgctatggcacccaaagcctccgtaatggcatggaagcagatttcttcccccccaacctcgccgtaacggctgaaaatatgtagaatgcgtgggcgttgcatggctgcggcggcacagggggttatccctggagttcccttctgagtttcgcgggatccttcaatagctcccgctgaatggcttcctgctgctggcgcagacggtcttcccgtaactgaagggattttttcccggctcccagcccggcattgacaaagggattgttgtccccgtatttggaccacgggccgcggggaatgcggtaaaattccacaaagcgccagtggacaatggctgttcctcccgtaatgcccagatagtcgcgtacggcaggggagatgtcaatgcccgcccctttgttctgggtattgacgggaggcttgtctccaaagacgtagggccagtcttccgtggtgaaggggccgcagtcttcccattgggcaaaacaggaacgcttgttgtagacgatttgcacccatctgcccttgcagacggattgcccctttcccgcatattcgcggcggaaccacgggatgacccgtgacgcctccgccttatgctcccctctggaaacgtcattataagggagcgccacgtaaaaggggttttgccgggggatgaatgttttcgggcggaagtccctcgtgcggcaaacgggatccgggttgtcgaagccgccgaagttttcccgccatgcggaatcccacgaacttttgtggttggctaccggattgcgttccgtgggttcttcccccacccagaagaccgtggcggtaatgttgagacgccagggataggtgccggggctttgcctggacgtcctgggaaggatgcggggagcgggccgctttcctccctctgcagcaacaggcgatttgacgatgacccggggcaggggggcccgttgcgttggggtgacgatgacggggcctttgggccgtccggaactgttcgccagggcgcgggtggcgctccggcctgtctggatgtccgccctggcggtttctgcggaaaccagaaccagcagcgtgagcaggcatgcggacaggagggggctcccgaagagccccttccgtaatgcctgttgacgctgccggtagtttaccatcggtgcagttgggtgacgaagcggtggtccagtttgccgggataatccgtattgaaatgaaggccgcggctttcattgcggcgcatggcgcagtccacgatcagggaggccaccgccaccaggttgcgcaattccagaatgtccggcgtaatgcggtatccccagtagaagtcctttacctcccggtgcagcatccggagccgcgtggctgcgcggtccagccttttattggtccgcacaatggagacgtaatcccacatcaggcggcggatttcatcccaattatgatagatgacggaaagttcgtcaggcagggctgtatctccgtggtgccaggctgggatgtcgtaaggagtgggggaatcctttctcaggggatgcagggagagcatggagttcagcgccctcttggcgaccaccacgcattccagaagggagttggaagccagccggttggcgccgtgaagaccggtgcagccggtttcccctgcggcgtaaaggccgtccaggctggtctggccgttgacgtccgtcagcacgccgccgcactggaaatgcgctgcgggaacaacgggaataggttccctggcgggattgacgccgtagcggttgcatgtctcgtaaatcaggggaaaacgttcctggacgaacccttccggcttgtgggagatatccagataaacgcacatgctgcccgtcctcttcatttccgaatctacggcgcgggcggtgatgtcgcgcggggccagggatttgcgggggtcgtacttgtgcatgaattccttcccgtccgcgcctatcagcacgccgccttccccgcgcacggcttcggagatgaggaaggagcgcgctttcgcgccttccgcgcgggtgttgaagaaacaggtgggatggaactgcacgaattccatgttggcgatggtggcccccgcccgccaggccatggctacgccgtcccccgtggcggaatcattattggtagtgtacagatacacgcgcccgcagccgccggtggcgagcagcacgcggtctgaccggaagatttccacttccccggagacgcggtccagcacgtaggctcccagaacgcggtcttccgtgacgaggcccagcttggtggtcgtaatcaggtcaatggcgaaatggtcttccagcagttcaatgttggggtgaagcttggccgcctccagaagtttggaggtaatttccagtccggttgcgtctttggcgtggaggatgcgccgtttggtgtggccgccctccctggccagttcataatcctctccctggttgccggggtcaaagttcactccccattccagcagttcccggatagcgtccgggccttcctccacgatagtgcgcacggcctgttcgttgcagaggcccgctccggcgtccagcgtatccgcaacatggtcttcaaaggaatcgttgcggtcccatacggcggcgatgccgccctgtgccttggcggaactgcaatccagaaatttgccttttgtaatgactgcaaccttgccgtgttccgccgctctcaaggcgaaactcaatccggcaacacctgccccaatgactaaaaagtcgctcgtcttcatcttgaatggtacggaattgtaccatgacgcgggctgccaagtcacgcccaatgatggggcggcagggcatatttgtctggaaaagaagtgtgaaacacgctaattcatgggcatgagaccccaagggaacgaacaggaagcgcgccggaacaagcatgtgcgcagcgcgccgtccaaaattgccgtgaaggcgctgggagaggaggtgctggacgggattctggacaaatcctccaaccctctgctgcttattctggactgcgtgcaggacccccacaacctgggagccatcctgcggacggcggacggcgcgggagtggatgccgtcatcgccccccgggacaaatccgtgggcattacggagacagtgctgcgcgtttccgtcggcgctgcggaaaaggtgccttttattcaggtgaccaatctggcgcgcaccatgaagcagctccagagccgcggcatctggatattcggcacgtcggacaaaggagaccgcgacctgtatgaaacggacttcacggggctggccgcactggtgatgggggcggaaggggaagggatgagaagattgacggaagagaactgcgatttcctgctgaggattcccatgaagggaagcattccgtgcctgaacgtatctgtggctacgggcgtatgcctgtatgaaatggtgcggcagcgttcctgattccatgactgtttttctccttccctcgtctttatgattcaggaacttgatcttgctccgggggaacgcgccaggtttatttcagacatccatttcggccatgccaaggcgctggcccgggagccggaagagctggggtttcttctggaggggtgctcccatctggtagtgtgcggggacctcagtgaaacccgtgaaagcccctgccgggaggaaggattggaaaaacgggcccgtttcctgcggatgtgccgggatgccggggtgcagcccgttctgctggccggcaaccatgatccggacgagaaagccagcctgctgaaattgcagggaggccgcatctgcgctttgcacggccatgcgctgttcagggaggtggctccgtggggatgggaatatttgaaaaacaagcaagtttcccgcgaactgatcgccgcgttcccggaggcggaggcagatttgctgcggcggctggagctggcccgtgccatgagtgtgctggtgcctcctgtttacacgcgttccggaacacatcaaaataaactggtgcgttttttagctcattctgcctggccgccggaacggcccgtgcggattcttctggcatggctgacgatgatgcggcgcatggggaaatttgcagaccgtttttttccggaagcggaagtcgtcatttttggccatcttcaccgacgggcggtgagcgggaaaaaggggcggcggctgtacgtcaacctgggtgcctgtttccgccatgccagatgctgggcggcggacgtaacgccggaaagaggagtctccatccgcagttatacgcccggaggatatgatggcccggaggaaattctccgctgattgatgcccacggaaaaaaagtgaggggaacgcgtccgtgtttaggcgataatgtgttagagcaccggatgactagtccatacagtttgtggacgcgttccccatagaatttggccgcgcctgttttccctggtagcaagcgggacagtttttcccggagcttttcagggcgcagccccggcagcagcaggggcgcgaggaggaaaaaaacctggagaagaagggctccattctggcgggtacgccgccggagcactttctttcaccgtttctttccgaattggggctgaccatgaagcaaagttagtgtaatctaactcatattgcaagaaaaaagtttgtctcgcctaatatttttcaagaagaggttgacttggtcagagccttggttattgttttttgttagttaaacctaataaacatcaatcatgatacatgaaaaattttccactccggagttgagcaacagcctggaagattatattgaagccgtccgcaacattgagttggaaaagggatgcgccaccgtaggggaaattgcggaagccctgaacgtgaaaaaaccttccgcctcactggccatgaagcagttgaaggaacgcggcctggtggaatacacgcagtattctcccattgtcctgaccaaggaaggccgttattacgcggaccgggtcatttcctgccataccatggtgaaggagttcctcattacggtgctgaagatggaggaaaaacgcgccgatgaagtggcctgttgcattgaacatatcatgactctggaggaaatctcccgtttccagcttctgacggatcgttgcagggaaagaggagaataaaatactcccacatgattttccggggggacggttcatgagggaatggctcatccctctcttttttacttcggaacccggaccgggggaaggcatcggcgtgtgctgcgcgcgctgacgtacactgtggaagcgttatggaggaacgcggaaagggccggggtaatcagcccgaacatgcccagcaggatcagagaggagttgaacccgatgataaagcggtagttacgttctattttttcaaggacggcacagctcaattcccttaaaacaaccagttcagccagagagctggacaacagggaaatatccgccacttcacgggcgatatcggaagaatccttcatggagacggaaacatctgcacaggaaagagcgggggaatcgttgatgccgtctcccaccatgcacactgttttgccggatttcttcaattgctggataaagcgggccttatcttcaggcagaacctgggaacggtattccgtgatgcccaactggcggctgatggcgcgggctgcggattcgctgtcccccgtgagcatgatgatggaggaaatgccctgccgtttcagccgggcgatcgtctctgcggcttccggcctgggcgggtcgctgacgccgatcatgccgattgctctgcggcctatggcgagaaagatgttggattttcctctggcgtgattgcgtatggtcagcctttgctcttccgtgagggggatgcgttcatcttcaaagagaaaatggtagctgcccacaagaaccttttttccatgaaggcgggaggaaatgccgtgggccacgatgtattccacctccgcgtgttcttcttcatggtgcagaccctcctccagcgctttgcgcacaacggcccgcgccacgctgtgggggaagtgttcttccaggcatgctgccgttttcaggatatattccctgctgcagtcgctcaaagggatgatctgcgttacctgagggcaggcggaagtcagcgtccccgtcttgtcaaaaacgatggtgtccgttttggcgaacagctccatgaatttcccgcccttgatcatgatcttgcgcgctgcggcctctttcatggcggagatgacggagatgggggtggcgagcttgatggcgcaggaataatccaccatcagcacggagagagccttggagatattcctggtgaacagaaacagcgcccctgccgtgagcagggtatagggaacgatagaatccgccagcttttccgcccggctttggatgcgcgctttcagttcctccgaatggtcgatcagggcgatgatattgttaatgcgggactggtctcctgcggcgtccacccggatgacgagggaacccgtttccagcgtggttccggcaaagacgacggacccttcccgtttggaagccgcttccgattcccccgtcatggcggcctggttgacttccgcttctccggacagcacggtaccgtccacagggatgacgttccccgcgtccacgcggattttctcccccgggcggatttgctccatgggaacctggcgcatgcctccctcttccacccgccagacgcggtctatatttatgctcaggctggccgcaagcgccgcccgggtctttttccgagtgtaattttccagcaggtctgaaatggaaagaaggaacatgatggaattggccgttccgtaagccttcgtgccgatggaaaccccgatggagacggcgtccagaacggctacgttgagccgtccgcttcccaggccggccattccgcgccgtaaataggaactgtaattccagaatactttggccattctgagcgggggcggcagaaacaccttgcaaaacaggaaagaggaagctttccccgctatgcggagaaaaaaggaccgggccagtttcctggcctccgcgcgctcttccggttcgtggctgcggagtgtttccggcctgagcctgtccagcgtgcggaaaatggcctgggggctggttccttcatacaggatgaacacacctccgttgcagggggtggccttgacggagtatacgcctttctgtttcaggagcctgcattcgatgccgtaagcctggtcatgattgaatgcgcagcggccgctgcgtacacggagcctgccgggcgtatgatggataacctggtaatgcatggataaggaaaaagaaaagggggaaacgcccttctccgtgcgtttcccccgttgggggcggtccattccgctggcggagaaggaaacgggcaccccgctgtttggtgatggacaatgagattgctactgttccggcctgctgtttttcgcggcggcctcatggcacaggtcttgggcttcttcccggatgtttgccagttgttccatggccttctgctggatgagcatggccttggaaaggccctggacggccaatttcctggcaacgggactttttactactttcgcgccgatggcggcggcgatcattcctccgacgaagccccagaggcctttgttgttcatgtaactcatggtaatgttttaattgggttcatccggctttggcggcatgcagccgcttcttttccggaaggattggattatatccaatccagcctgcatttttttagcgtgcccccgtattctggtcaagctgaattagctgaaactaatttttttagtaggcatgaaaatatttttgcgatatttttaatacgttgaaaacaaataaaatataatgaaccaacataatgttgtactgagcagggcaagggcattgggaagaaaaagtgttgactgaatagttagttcaatctaactttgccgcgttgcatgaacttgacccatacaggacttcaccgtttcttccgccgggtctgccggtacaggaaactggccgggctgctcatccggcgtcccagataccgtctgctctgcggagactgtgggttctgtatgggggcatgcggcagagctgtgaaagagcaagcccgggagaacggaagcggagctctttccctgtaaaaggaaagcgcccctctccacctctggatcaatcatataagtattataccacaaacatccaacgataagactaaccgttttctatgaagaagcataacataatagcaatggcgttgacgagcctcatggcgcttcctgtaatcgctcaagacagcacccctgctgttggtgatattttgcagggcatcaatatgttcactccggaagaaggcgatcctgcctacaaggtgaaggccaatgagaaatacggcacccaatggggtgtggatatggcctacgggctttggaatacggaaaaggtttccgatgttaagcgccataacaacctggctcttcttcatgcccagcttaatcagcgccttattgaagacaaggccaacgggggaacctggttgcgtgtggaattttccggttcatgggggctggatcgtgaatccgcacagagcgatacgtttttcactgaagcctatgccacggcttccggcttgcatgctgacgcgatgggacctcatgaaggaatattccctgaagtggcgctgatgcaatactttgcagggaagcgcgcttgcctcatcgcaggtatggtgaatctcaccaactactttgatgctgtcagcattgccaatgactccttctcctctttcaccaatgacgggtttgtgaactccactatcctgcctttggtggacagcaatattggcggtattctgcaagttgaactcaaccgcaataattacatgatggttgccgtttcccgcacgggatgcgattccggatacaatccttttaattccgattattgcgatggttatgccgtggttggcgaatacggccatatctttgccgacggcgctgcgactctccgcatcaatccgttctataccagcacggatgtggacatggacgacgggaccggggaacgccgccgccaaaatgccgggcttgtcgcgagcatcgaatatactccctgcgatcctctgaccatttactctcgcgccggatttgccgccaaacaatacttgagcaactccgctgaattctccgtgggcgccaacattaagctcttcccttcccgtgaagatgacttcctgggcatttcctacggtgtgttcaaggggcagaccccctgtgacggagagcgcgctgagcataaccgcgaacaggtgctggaagtcatgtacagcttccaggtgaatgattatttcaaagttgttcctcacttccagtacatcgcgaatccggcttacagcacttccagcgaaaacattctctggggcgttcaggcagtcttttctttctgatcagctgatcctggacatggccgccttttctcttaaatcaggcatggccggagtttcatgaaaacataatgacattaaatcttccttgtctgtctccatgcagtgagcggaatcctgcgtgagaaagatatagaaggggtctgcatgacctggcggcaacgccgcattctcgatcaggtagaggatgcggcgttgcttatttgattacggagccatttaccctcctttattgatgcctgctggcggagcttggaccggcaatgtatgccgggtcatggaatggccttcagcctttccttatctaccgtcaaatactgactgttgaaggtaggaggcttccccaaggctattccgtagaatttttatcccagggaaaaataaaagccgcctgaaaatgggctttcccacccctgtctccgttcccggaaaaaacggaaaagaaggctttttgccacgccggaagatggatgggagccgcaacgtttccgggggccgaagcgtttaaaaccatattgacttaaacgggaattatcttaaactgacagaatgagtaaggttcaatgggaaatttcaaatgatgaagtgaccgaccgtgatactgctctgcgccgcttgcaggaaggaacgaccggccacgtggtgtgcgcccgcgacggcgcgtgcctccagtcttataaggaagcggatggcgtgtaccattgcgaaattgtattcaagacggattcctgctgcccgccggtattcgccgccccggaaggggtgacgggaaaggagctggaaatgctttacgatcgttttgccaatggggacgatttttcctttgtggaaaaggaatgggaacctctgatggccgtggaataccgccatcgccacaatgtgatgtggttcatcttcctgttcattgcgctggtaattgcggccatggcggcatatcagcacggttggattgagtgagaggggagaggctgtctgcggcatgcgccgtagcagaaaaacctgcaaaccgtagaaaatggtttgcaggttctggatgggataaccggggccgggatttaatcctgtttttcgtggtcgtgatggtggccgccgcagcaatttctgtcgttgccgcaacatccgcagttgccgcagcatttgccgcgcttgctgaaaattttgtataacgcgtaagccagggccaggaaaagaagggtggcgatgatatatgttcccatattagtcagtagagttaaggaattggtttagaagttatttggaggctgtataaggtttctttgccaccaggtaaacgaaccccagcaggagcaatagggcaatgccctgcccgatgccgaaggaagcttccgcataaagccatgctcccagctggtaaatcaggaaggccaggcagtacgccagggcgcacatgtagccgatggcgaagaaggtccatttggcgctgttcatttcccttctgatagcgcccatggccgcgaagcagggggcgcagagaagattgaaaatcatgaaggagaaagcgctcaggaaggtgaaggctcccgcttggaccaggcggtccccggtttccctgatttccgcatcttcatcttcctcttcttccgcttcagcagcggattctccggaaccttcctccagggatgcctggagctcccggccggcgggggacatttcctgcgtttcgggggagtcctccgttttttccgcttcatcttccccggaactgccgtccgcatacaggacgccgaaggtgcctaccacgttttccttggcaatcaatccggtaatggtagccatggtgggtttccattcaccccagcccagaggctggaagacaggcgcggccacattgccgatggaggccagcatgctgtcattctgctctacggaatccaccttccagttgtagctggagaggaaccagatcagggcgctggacacaaagatgacggtcccggctttttgcacgaaagctttgcagcggtcccatgcatgaatgatgacgttcttccaggccgggatgtggtaaatgggaagttccatgacgaagggagtgggatccccggcgaacatggcagtctttttcagaataaggccggaaaggatgatggcgcccaccccgatgaaataggcccccggagccacccaggaattttccgggaagaaggctccggcaatcagggcaatgatgggagttttggccccgcaggggatgaacgtggtggtcatgatagtcatgcgcctgtccttttcgttctcaatggtgcgggtcgccatgactccaggaacgccgcaccccatggaaacgagcatgggaataaaggatttcccggaaaggccggatttgcggaaaatgcggtccatgatgaacgctacgcgggccatgtagccgcaatcctccaatatgcccaggcacaggaacagaaccgccatttgcgggaggaatcccagaacggctcccacgccggcaatcacgccgtcctggatcaggctttccagccatggggcgcagccggcgttttccagcaggcttcctacccattccggaacccattccccgaagaaagtatcattggcccagtccgtgccccatgcgcctatcgtctgaatggagatgtaatatacagcccacatgacgacggcaaaaatggggaggcccagccagcggttggtgatgatgcgatcaatcctgtcgctgcccgtcaggctgccggggctggctttaacgacggcgtctttgatgatgcgggaaatggaattatagcgttcattggtgataatggattcactatcgtcatccatttcccgttccatggtttcaataatcccgttgatgcgggattgttcctcgggattgagcgcgagctggtccgcgactttttggtctctttcgaaaactttaacggcaaaccattttttctgctgatccaggcatttgccggtgatgatttccccaatttctccgatggctttttccagatggtccggaaagtggacggcctgcggggtccgggcgtcgtccgacgcagtcgtcgttactacggcgtctatcagttcacggatgccggtccccttgagagcgctgatttccagcacctggcaaccgaggttgcgtgcaagtttttccgtgtcgatcctgtcgccgcgcttccggacaatgtccatcatgttcagcgctataatgacgggaacgcccagttcgcaaagctgggtggtgaggtaaagattgcgttccaggttgctgccgtcaaccaggttcaggatgagggagggatggtccgtgaccaggtaattccggctgacgacttcctccagggtatagggggaaagggaataaatgcccggaaggtcttcaatgatgatatttttatggcctttcaggcggccttcctttttttccacggtgacgccgggccagttcccgacgtattggttggcgcctgtcagggcgttaaagagcgtggttttcccgcagttggggttgcccgctagggcgatggtaatgttgctcatgaatggtttccttgtcttgatatatgggtgcccgtcttgctgtaaagtcaggaaacgtgcggtaatagaggcggaatcaatggatatggatgttctccgcttccgatttgcgaatggagagttcgtacccgcggacagtaacttcaatgggatctcccagaggggcgactttgcggatgaatatctgcgttcccttggtaacccccatgtccatgatgcgtcttctgaccgggccttcccccgccagtttgccgacggtgacggtttccccgatgagggcatctttcaatgtacgatgtttggtcatagaataatggttggttgttggatggaataactcaggcaacgaatattttgctggcaagcgccttgctgagcgcaatcctggagcctttgacgttgataatgaaattaccgccgttttcggaaacgatggagaccgtgctcccggcaacgaagcccaggctttccagaaaacgccgggtttcatccttgccatggattttgttgacttggcgaatatcgccgatgttgagcatggagagtggcatggtgcgtgtatgaatcaaatccggaaagaagttagttttatcaaactgataagtcaatgatattattaggctatatttgttcaatcaatgtaaaatacatttaatataaattgtttatgtattagtttaatctaagtgtagccgacagggaagaggaagggaatggaagtttcccggcagtgcctgccgtaggaactggaaggaaaatgcaaaaaagccgcgccaatgaatgttcattggcgcggctggaaaaagagcttttcttcagattcaggaggcagggcaaacttcgccctggacgggtttgccgttgtattctccggtaagcgtcttcaggaaagccaccagaagtctcacttccttcttgtccagtttatcgtaaccgagctggtaatggtacattttcgtaatggcttcctccagcgtctgtgcggaggcgtcatgcatgtacggccaggtgagttctacgttgcggagggtcggaacgcggaagcggtgcctgtccgattcctttttggagaaattcatcaggccgttatcgtcattggtcttggcgcgtccggcaaagaaatcgcctttgaggtcggcgtattcaaaggactggcctcccatggcgggaccggtgtggcaggtctggcaaccaagcttcaggaaaagcttgtaaccttttttggcgttctcgctgatggcgttttcatcccctttcaggtagcggtcaaacgggctgttcggggtgataagagttttttcatattccgcgatggcattcgtgatggtctctccggtgaatccctgggggtaaacctttttgaattctgcggcaaaagcggtgtcctggtccagtttggcagcgatcttcttccagtcatccggatgttcgtaccccatttccaccggattcaggggcggtccgccggcctgttcctggaggttggctgcgcgtccgtcccaaaattgcttggcatggaaagcggcattgaaaacggtgggggcattgatgccgcctttctggccgcggactccggtggaagtgggcaggttgtccgtcccggctttttccagggaatggcaggaagcgcaggaaacggtattatccgtggaaaggcgcacgtcatgaaaaagcttgtagcccagggccactttggccggatccgtggggagggcgtccggaatgggggcaagaggggaaagggcgtattcctctcctaccatatcaccgaaaattttcaggcgctcatccttgatccactggagcatggcgtttttctcccggagagtgagcgtgctgccccagtgcaccatggtgtaggaagtggggggcatggaattgatttgaagcacatgttccagcttggaaagggtgacggcagtgggaggttcttccatattgtagctgcgctgcccgtccctgatatggcgcgccagcaggcctccggaaagagtattgaccagttcggaaatgtgagtgccgggcttgtggcagtccgcacatttggaattcatggtctgtgcggtaatttccgccgcctgggcggacgtcagtggcttgacattctggttcggcaggaacaggggggcgacagccgccgtcacgatgaccgtgccgcccagaatggctcctgccttgatgaaggaacatgttttgctcatgagattctcaatgacgtggaattgcccggatggtaaaaggggaaggataaaaaatcaagatttattctaaagttcgccggcctttctcaggtcttcgttaatggcttccagaacatccgcttccggggtgaaattggcggcatggtaggagctgcggaccaacggcccggatgccacgtgcctgaagcctttggagcgcgcaacttcctcataccgggcgaaatcatccggatggacgtatttgaccaccggaagatggttgcgggaggggcgcaggtattgccccaacgtcaggaccgtgacgccgtgctccagcaaatcgtccatggagcggaaaagctcttcttccgtttcccccaggcccagcatgatgccgctcttggtagacactttgccgtccacgcactccagagccatccggagaacgcgcagggaccgacggtactgggcgcggaagcggacaatgggcgtgaggcgttccaccgtctccagattgtgtccgaaaatatgcggacgggccgccatcagcgtctggatggaggagggcttctcattcaagtccgaggcaagcacttcaatgatcgtggaagggctggcttttctgacggccctaattacctgggcgaaatgcgcggcggcgccgtccggcaaatcatcccgggtgaccatggtaattacggcgtggcgcagcttcatgtgcacgacggcttccgccacgtgctgcggttcttcaggatccagcgggccgggcttggccgtgcgggtggcgcagaatccgcaggcgcgcgtgcaccgttctccggcaatcatgaacgtggccgtaccctggttccaacattcataacggttggggcagtgtgcttcttcacagacggtgaagaggtttttgccttccacaagctgcttgacgtcccagaattcccggccgttgggcagacgaaccttgatccacgacggtttgcgttccgttccttccgcagtctcattgtcgttccggcgttccatagtcccgctagcttgccgtgactctgctgctttggcaaatgcaaagtgttttattccggacttcattccccgttttcatccggaggggaagaaagacgcgcagacaattttttccgttcttttgccgccagacgcgccgcacggaaaaactcctggagatgaagcaggcactcgtctcccagtacgccgggacgcacctcgcacttatggttcaggggcggattggaatccagcagattgatccagccccccgcagccccggtttttgcatccgggcagccgaaaacgacgcggtccggacggcagtggacgatagctcctgcgcacatggggcacggctccttggtgacatacagggtgcagccttccagccgccagtcgcccaaagcctcctgggccgccgtcagggcaatcatctccgcatgggccgtagcatccttgagcgtctccacctggttccagccccggccgatcacgcggccatccttcaccacaatggctccaacaggcacttcccctttcacgagggcctttctggattctttcatggcttggcgcatgaaccattcgtccgaaccgggcatttccatcattacggaggttatcatggaccgggcggcgcggttctggcaagctctttctggaagattcttattgtgttttatacggtaagtgcgccatgccgcggaaaggggtggggatgaatgcgtttttacgttgattccggagaatgggtggcataagtatggactatgagcttttcagaaccctgtgccttggccgttgatttcggcggcacgagcatcaaaatgggcgtaacggcgggggatcgtattctggcgacggccgaccgcatccctactgccatgttcgaaagcccgcaggcaatcattgatgccatgattgcgtccgcccgcaccctgcgcggacaattcccctccgcctgtgtgatgggcatgggaatgccgggatggtgtgattaccagcggggagtgctttaccagcttaccaatgtgagggtctgggatagggaaattccggtgaaagagatgatggagcaggccctgggcctccccgtcgtgctggataatgacgccaactgcatggcttatgcggaatggaagctgggcgccgggcgcggcatgtccagcctggtgtgcctgacgatgggaacggggataggcgggggaatcgtggtgcatgaccgcatgctgcggggaaggcggctttccgctgcggaactgggccagaccagcattcattaccaggggaaaacgggaccgttcggcagccggggagccattgaggaatacatcggcaacaacgaactggcggcggaggcggttaaacggtatgccggggcgggaatcatcaagacggtggatgaatgcacgcccaggcatctggacgaggctgcccggtccggatgtcctatagcccttcaattatgggaagatacggcggaaatgctgggctgcctgatcatgaacctgatgtatacgctggtgtcggacgccttcatcatcgggggcggtgtggccaaggcaggggatttgttgatgaagccgctgctggagaacctcaggaaacagttgtttcctctcctgatggaggatttgaaaattctgcctgccagatttggagcggaggcggggttgctgggagcgggagccatggcgatggatgaattcatggggatggggattttggaacggtttaaggatcagaaatcaacgcagactttttgttagtttgggctaatatagggcttgccatgccggagaggcaggcgtacaagcggaacaggtcatgagcacggaacattcccacgaacattttccggaaggtgcttcctgttgttccggaagctgcggttctggaagctgttgctgctccggagacgccatcgggcctgttcccgccgtgctgggcattgccctgttcatcagtgcgctggcggcgggcggcgattccctggccggtatggccgcctacgtgggctcctacctgctgataggctgggatgtactgaaggccgcctttctggggatgatgcgcggccgcgccatcaatgaaaattttctgatgagtattgcttccctgggggcgatgttcctgggggattattccgaggcggtgggggtgatgctgttctaccgcgtgggagagtaccttcaggaacgtgcggtgggcagctcccgccggtccgtaagcgaactgatgagtctgaggcctgaggccgtccatgtgaaaaaagccggagccgtagatgacgttcctccttccgaggttctgcccggctccctgattgaagtgcgccccggcgaacgcgttccgttggacggtgtggtaacgggaggtttctccgtgctggatacctccgccatgaccggggaatccctgccggtggaagccggatccggaagccccgtgctggcggggtacatcaacgggcagggtgtgctggaagtgcgtacggagcgggactggcggcattccgccctggcgcgggtccaggaacaggtggaagccgcatcaggccgcaaatcccctctggaggggaggctgtcctcattttcccgcatttatacgccgctggtgatttccatagccgctctggtatttttgctttatccccttgtgacgagcggaagctgggcggacggtctgttccgcgccctggtcctgctggtgatttcctgcccctgcgcgctggtactgtccatcccgctgggcttttttgccggaatagggagagcggcgcggcaggggattttgctgaaagggagcaactatctggatgccctgcggaaggtgaagacggtggtgtttgacaaaaccggaaccttgacggaaggcgttttttccgtggatgaagtgcttccccgtgacggcgtttccccggaggaactgctgtactgggcggcccatgcggaactctctgcctcccatccgctggggcgttccattgtgaaggcatatgaagggactctgtttccggaccgcgtggcggaactggtagaggtgacgggcggaggcgtttcagcccgcgtggaagggagaccggttctggtggggaaaaagtcttttcttcaagaggccggcgtaaggacggaggagggagaagaccatggcgtgaccgtttatgcggcgttggacggcatacttctgggatgcctccgcctgtctgaccgcgtcaagccgggagcggagcgtgcggtgcggaaattgagggaactgggcgtttccaacctggtcatgctgacgggggattcttcttccgccggaacggaagtggggcttaagctggggatggacgaggtattctgcgggctgatgcctgccggcaagctggagcatgtgcgccggctgaaacctgaaacggggctgcttgcctttgtgggggacggtatgaatgacgccccttccctcgctgctgccgacatcggcattgccatgggcggcgtagggtccgatacggctcttcaggcggctgacgtagtggtgatgaagggagatcccttggccgttccgctggggatgatgctttcccaagccacagagcgcatcattttgcagaacatcgttcttattttgggcgtcaaaattctggtcatggtgctgggtattctggggctggcggggatgtgggccgccgtgatggcggatgtgggcgtctgcctgcttgcggtgggcaactccatgcgtattttccgggtgaagctggacatgtgacgaaagggaactctcttcctccccctgtttatgggaggatgcccccatcccgatatccggatgctgccgcggaatcttggaacagcggaagatatcctgataaaaaagcctccgttccggcgggcggaacggaggacgggggaaaaacaggccgggcagaaaatcttaccgcagccccgtcagcagaagttccgcgttattctgtgtcttggagatattttgcaggagagcctgaaggccttcccatcccggtttcatggcgagctggcggcgcaattgcatgattttgacgaattcctgttcgttatacagcctgtcgtcattgcgggtgccgctctgggaaagggaaatggccggataaatgcgccgttcggaaagttcccggtccaggcggatttccagattgcccgttcccttgaattcttcaaaaatcacttcgtccattcttgattccgtgtctaccaggcatgtggcgatgatggtcaggctgcctccttcttccacattgcgcgccgcggaaaagaatttgcgcggtttttccaatgcattggaccccaggccgccggacatgatgcgtcctcccgtctggttggcattgtagccgcgggccagcctggtgagggaatccagcaggatgacgacgtctctgcccatttccaccaggcgtttggcccgttcgataaccagatcggaaacctgggcatggcgccgggaaggttcgtcaaaagtggaggcgaataccggagcatccacggtttcttcaaaatccgttacttcctccggacgttcgtccaacaacagcacaatcagttccacttccggataattggccctgatggaacgggcgattgttttcagaagaacggtttttcctccgcgcgggggggccacaatcaggccgcgctgccctttgccgaagggcgtcatgaggtccagtacgcgcatggcggcggaattgacccccttgttttccagaaggaggcgttccttggggaagaggggggtgaggcgttcaaaatcgctgcgcgcccggtagtcttccgcagggatgtcctccacgctgatgacggaggctgcagaaaggtacttgtcatgaggccgcaatttgcgcagcctgaccttgatctgctggcctacgcgaagatgcaggggtttgatgagattgccgcccagataaatatcatccggagaggtgcggaaacttttcaccggatccctcagcatggcgtaattatccttggcttgttccatgaccccggaaactacgacttcatggccctttgccagaagctgtttccccaattcaaaaaccagctgagacttggtgagggaggccgcgttccggatgggcagcccttccgccatttcctgaagatcgttcagggggcgtttccgcagttcattgatgtcaatctgctccagaacaggggctgcttcctcctcctcccggactgcgtttccactattttcctccggagcggcagtcggctgttccccggcggtttcttccggcgcgggcaggggcttggggagggtttcctgcggaatatctccggcgggggaaggggtgttgtcgagttcttcagtcatgaaaaaaatgttggtaaagtctttgggtttgctggcggagcaggtccggggggccttcattccagatgacgaagtcggccgcagccactttttccatgataggccgctgggccgccagaatggcttcaatcatatcctcccggaatccattcctgatagccaggcgggttttctgcgttcccctggaaacagccaccacgcacacggcatcttggcaatagcgcgccgaagtttcaaaaaacaggggcacgtcaatgacaaacccgtccacctccgtattctgacgcgccgccagcatttgcgcaagacattcttgatgcagcagggggtgaatgatcccttccagcgttctgcggctttccggattccggaaaacaagctcccgcagaaaatgcctgtcagcctttccggaggagtctacgctggctgggccgaagacgctggagaggggggctttcagcgtaccgccatccagcaatctgcccgcctccgcatcacagtcaaacaggcgcaggcgcgcgcctcccgcctccatcagcagacggatgaatgtagatttcccggtggctattcctccggtaacaatcagggttttcatggggggaagggaaagtaaggcgcttctgggatataaagagcgggtgaaagggttaccctttcacccgctccaatatggacgttatgcacgcagcctacatgggaggcagcaggccttcggaggcgggaagggcgctttccggagcggccgcagtgggaagggcattgccgcgtacgggctggcccgtggcgtcaatgatctgtcccgttacgaagatcatcagattcttcttgatgtggttgtcggagttgctgcggaagaagcggccgatgagaggcaggtcaccgaagatcggcactttgtcttccaccgtctgcacgttttccgtgatcaaaccaccgattgccacggtatggccgtcgtagatgaacagggacgtttcaacggacctcttggagaagatcggctgctcgatgcggttttccgtcagcgtcagggacatcggcttgccgtcggaaccaacgccggtggactggatcgggctgccgtagttcacgaagccttcaaattccacgatgctgggcttgaagttcaggtcgatgatgtacttgttgtcgccaatggtaggcaccacttccagagttacgccgacgggcttcatttcaaacacgccgggggtggcgggagtgacggggaagctggatatctggggctggatctgattgcccagcaggccgtccacgatgttaccgttgttcccataaccgtaaccgttgttatagccgctgttgcctacggagttggggagttccggcggttcgtattcggtgggataccagaattcgcggatgatttcaatcttggcggtttcaccggacttggcggtcacgctgggggcggtgaggacgtcagagccttttttctgggacaggccgcgcatcagcatctggaaggagccttcgtcataaatgcccgtcagggacatgatgccgggagcggcgtttttctgggaggcttcagagcggttggtgctgttcagcagattgtccacggagttcttggtgatggcgtagtcacccgtgcggttgccgccggtaacgaggccgttgatggtgtcgctgccgctgtttacaggccagccggtcacgccgccgggagactgggtaaagctgtcggaagtggaaccggtgccgtagttcgtgccgccgcccaggaaggtgctgcggtcattgcttacggagaacggggtgacaatccagtcaaagccgagttcttccgtgttttcctgggttacttccacgaacttggtcatgatgcgcacctgctgggattcgccgcgggtgttttcaatgagctgttcgatcaggtccaggttgccggaagtgttgcggacgaccagggaggaattgccgttgacaaggaatgccgtggcgccttccgggaagctgatgccgctcttttgcagcaggctgcggatggagggcatgggcttaaggccggaggagctttcgccaccgccgccaaaggggtcgtcactgacttcgccgccgccgtcgccgacggtggtgcggagagcggactggaagcccgggggcacggagaaggtgcgctggtacagatccacgtcattaccgccggcaggaaggatggtcactgcatagtcttccaccttctggcgcaggccggcattgctgcagatgaagcggagcacttccagcataggaacattagtcagcttcaactggccgattttgcgggtgcggatgctttcctgcggggctgctgccggagcagcttccgtgacttccgcggtttcttcgccaaagccgtcttcatcagttgcgggaacggcgggggcgacggcagcgggctgggaatcattgatgacaaagttgatgccgcgttcaccgttcgggcctaccgtgcgatccagttcaatggactttttgcgcagatagtcaatggcgtcttccacggtggtgtcttcaaaagagacggaggggatgatgatgctcttgagcttcatcagattggccgtggcgccgttgatgtccgtgatcggtgcgttgtcagtgccgtcggctccggtcgggacttccatcgggatggggcgttcccacatcttgtccacttccgccagcatggtgctgcgggtttcgtcgtaagcggctgcatagtaagccattctgcggcggttgaccgtttcttgtccgcggcgggccgccacgttgtacgggtcgatggagagaaccttgttgaattcggcgatggctttgtcgtagtcgccgaggtcatagtaaccataggccatgtgaaggagggtgttcaccttttccacgtttttcacgtgttcgggggtgagcgccggattcgtgcgaatcgggtccttcatgtattcgagcgtctgcttggcaagcttggcgctccggggattgagcttgatggcatcctgcagaagcttgtcggcttcgtcatagcgccccactttgatgtattcctgagcaacggcgatgctggcgtcgccaatatggttggcgatagcttccttgcgctggtcgttgatcggcgcggaaggcagcatgttgtaagcggcgttgtatttgtccagggcttccttgtacttgccttcgcggtacaggttgcggccttccgcaaggagttgcatggcttcctgggtttgcgcttcgcggcgggccatggctgtgcgcgctgcactggactggtattggtaactgcccggtccggcgtaggacgatcccaaggcactggaggttccgacggcgccgccatcaccagcctgcgcaaacgggcaggaggcagcaatggccatcagcgcgatcagggaacgcttcggttgataaagtggtgcgtggtccatagttaggttcttctttttacatgtttttcggatttgtgaagcttttttttcagaaaagtttaaatccggctctattttttcttgctcagtgttgtttgttctccagtggttttgttggcaatggttacggtctgtgtagcattatcaacggttttcagcgtgtagatctgtttggcgtctcccggaatccggaagtcggaaccttcctctacttcaaagctggtatcccgttcggggccggccgtgatagtaaggtttactttcttatcaatgattggaatgacgtattttgttccgcgcctgatggtgtaggtttgtccgtttttggtcggcttcaaatccttgacgacggcttcctcgtccgtttccaccatgtccaggctgggattcttgaattcctttttgacaacgctgacaagttcgaatctgggctcgtcttttgtattcttacgggtaccgaacttgccgttggtctggacgatgtttttccagatttcctgtttggcgcggttcatacccttaaaggtaaagtcattgccatccgcctgggtgaaagccaggtagaagccgaactgcttgatttcgtcgacaaaaagtttgctgaccaggggaggatggctgttggggtcgttgggatgggttttggccgcatattcctcctgcaccgtaaatccatcgttgtccgggtcccgggtcaggacgtccgagtaaacgaattcattttccagtccgttgtccaggaaccatttgttcgggatgttgccgtggataggcggaccggagatgatgtcaaagggttccattcccccctccttaatccagagattgggggcgacgaagcccacatacttctgcgtttcctgggcaatcggcttgagttcgtgggaggcggaaagctcctggcctacttctgcggctttcttgatgccgggaggcggttcgatggctttttcagaaacctgcgtggtgaatttgtatttgtcattcagtcccagaaaggtcagcgtaccataggcggccactcccaggcccaggacgattccggatgccaacaggattttgtcgtaattttgtttttcagacatgttgaaagtatttgctgcggttggtgttgccttggttaatcttcagacggttcctgagccttgggctggttgaagtggaccagattcagggagacctggacaaagacctgctccttgcccatgtaaggcttgatgacttgctggatggccggggctgcaggtgcggccgcctcatccgccggagtcagggaagccgcacccgtggcgggttgggcagcggcaggtttggcggctgccggattggcgatgggagggggcatcatccgttcgttacggatacggatggagttgaccgtgaacagatagtcctgcatgccggttatggcgttcatggctttcaatacactttcccggtcgccctggaaggctatttccagaggcatgggagtccatggagcctggtcggcttcgtccgattcttccggactgttcgccggggtttcaatggggagctgggggcggtacaccttgatgaatttggacaggccgcattccgccagtttgttgaccaggctgttgatggctttcaattcaaaacccagcgtggaggccgcctgaacagagggagcctgggtgctgtaaacctggaagccgagccaggaggatgtgtccgttatgagaatgttctttttcttgcaggaggagatcagggaatccctgaatgttttcagttcattctggaatgccgtgggcgtggtggggaccagcgcggaggaggcaaggaagggcttgtaggccgtttccaggctgcccacggccttggcatagcggttcagttctttttccagctcttcgttggatgagcggctcggagtgatttccgcagcattggcggacttgatttccttggcggcgatgctgatttttttgtccagttcactgcgtttggaattgacgatgtaccctgtcgcggataaccccaggaataagagaagccccacgcccgcgaccatggcggcgggcttgttgtctgtaatccaattgctcataaaatatgtcttgttcgggttgggtaatcttatttgttaaagttcacgggaatgggcgtttttaacggaagcaccagcttgaagggtacaaaggcccctgccgccgcgtccaccttggcgtccttggctcccagttccatgatttggcgggcttccagtttgacgtctccgggcttgaaagtgaacagggattccttgttcccgtctatttttgcctggaggtcctggatgattctctggccgcccaggctgcgccggacgaatccggtcaggcggatggcgttgacgctgtaaacgcccgcttcatcctcgctggatgcgttggcggaggcctccgtcctgatgtcatccaccagggatgtatttttgtccgatgtgaaggaatccttgatgacggaatatcccgtaatttgggtggtatcctccggattgaagtgggccagcggttcaaaatccgtaaaccagtagggataatccttgtgttccgactgttccagcaggtgcctgatgatgtccgcgtagccgtagcgctgaagcgtgagctgctggtaggaagccagggtggagtccagttttttcagctcctgttctttctggcgcagggcggattgtgccgatttgatggaagtaacggtgggctggacgccggcgaggatttcctccgcctttttctctcccatatatcctgtgacggcataagctgcggcaccaagaacggcaatggctgccccggcgatgatggcgggcatttttttctggttggcccgctttttggcaactgcggtgggttctaggtcaatattgagagaggccctgccgatggagtgaatggcggtgccgatcaatccgcccaggatgaaggcttcgcgggagatggtgttcacgtccacgccggagcccacgcccacgttgtgcatggggttgaagaaggagatcggaatgcccagtttatcttccaggaattccttggtatagggcagggaagctccgccgccgcacaggtatgccttgacgggagcgcttccgctcatctgggcgcggtaatggttggtggttcgctggatttctgaggcaagccgggtcatggccgtacggatgacggtagccagattggccgtggcgggatccagcccttccgtttgcccgttgctcatggaaacgagcccgctggtggttttcaagcgttccgcttccaggaagggaatattgaattcacgggcgatagcggaggttacgaagattccccccgcggaaatgctgcgggtgaagaaacgtccctgttcgctgtaaatcaaatccgtggatttggcgccgatgtcgatgagcatgaccggttctttctcatccggataactgtccacatacgcattgtacagagaggtaagcgcgcagtccactttgccggtggaaaggccgtgggagacgatttcatcattcagggagtccaggtcttccgccttgatggcaaccaggatggcttcccgttccagacctttggcgggaagcagatggtagtcccacacgacttcgtccagcgggaaggggacgtgctgctgggcttcaaagcggatgagctgttccacatcggtatcgtccagagccggaagcttgacgaagcggatgaaaacggattgtccggaaacggaatagttgacgacgcttcctttgacgttgagttcctggacaaggtcggcgatggcttcccctattttcgtcaggcgcaaaccttctgctgacgggtccagcactacgaggcgcgtagcatagcggtccaggataagggcgtctttggaagtcttggaaaagacgcccattgaaactctctgggaacctacgtttaatgcgacgattggtcgtgaattagccatgggtgatttctgttaaataagatgaaatgatagaattaatggaacgttattcgccgtccgccggaggttccacaggagtaccgaacggggcggggacggaactggaagccgcctgctggctgttgggcctcataatttccggataacggtcgtaccagaacacggagaaaggtgtttcatccttgttcagcagggggtaataagaggtctccacgatgctgggggactggatggtccaccatttttccatcttgccgcgttcggaggaataagtggcgacaatcttgccgttgtattccaccactacgccctggtacttcacccattttcctcttcctccttccacaccggtaatgcgcttgacggaggacggggagagatacacggaagcgtacgtgttttctcctaccggaacattgacgtatttgacttccttatacagtttcaggtactggcgggagcggtccggattgactaccgcgatgtagaatttgaacgtcagggcatcaatatagccggatttgggggtgggagcggcttccaccttgaagggaatttcaaaatccgcccatttcttcggtttcggcagcggccggggatcgtcctgcgtcaggacgttgggggactggcgcatatacagggacagcttttccagggagacccgcacctgcattctgggattgctggtggtctgcgccgatgccgcagggacgaaaagcaccgcagccagcatggccgtgatagtgttaaggatggatttcatagcacaattcaattccctgattagttacaccaaaaaccgaactgtggctagcaaaaatctcttgtttcttttcatgtagcgtgtgtggagcatgacacggctccgcccggcggttctgcccgggcggtcaagaaaaaaacatgcggcatggttgcgggcttgacctggcagaggtgtttccacatgctcggcccatggcgattgattctgatctgctgaagaagttttcagaggcccacggtatttcggggcatgaggatgaagtgagaagcctggtggctcaggaacttgaaggatatggggaattttcttccgatggttccggcagcctgttctgtaccggcggaggggccggcccccgcgtgatgctggccgcccacatggatgaaataggcttcctggtgcagaatatagcgtcgaacggtttccttcagttggtggggataggcggctggtggccgcataccctgttaagccagcgtgtcctggtaaaaacccgctcgggccgcggcatccggggggtgattggttccaagcctccccattttctgccggaaggccagcgcaacagcgtcatgagcatggaagccctttttgtagacgtgggcgctgaaagcgcggaacaggtgaagaatgaattcggtattcacctgggggatcccgtggtgccggacgtgaaattctccccgttggaaaatccgttccgggtcatggggaaagcctttgacaaccgcgccggtctttctgtgatgatagaggcattcaaaaaattatgccgggaagggcatcccaacaccctgattgccgccgcgacggttcaggaggaggtgggcacgcggggcgccaggacggccggcgtcgccatgcaaccggattgcgtgattgttctggaagggccgcagacagacgacacccccgggtttgccgtgacggattcccaaggggccttgggcggaggcgtgcagatcaggctgtttgaccccacggccatcaccaatccccggctggccgccctggccgaaaaaacggctttggatgcgggcatcccattccagttgacggtgcgccgttccggcggaacggatgcggctgccctgcatctttccggaaagggtgttcccactattgtgctgggaattcccacccggtacattcatgcccataacggcgtgctggatctgcgggactaccgtgccgcggtggaattgacggtggctctggcccgttccctggaccaggaggccgtggaagcccttacccattacctgccctgaaagaaacgctcatgaatccgaccgtttacgtacatgacctggaccctgtcatctggcagataacggactcaattgccctgcgctggtatggcctggcctatttaatgggcttcatcggcgggtattatctgctttcctggctttcccgccggaagctgtatcctgtcccccaggataaaatggcggattttgttacttatgtggctatttttggtgttctgatcggcggaaggctgggatatgtgctcttttaccagattcccaaccacggctggtcccagtttctggcggatccgctcatggtcctgagggtgtgggaagggggcatggccagccacgggggaatgattggagtggggctgtatacattttattatgcgtggaagcaccgcgtcaagtgggtggcgcttctggacggcctggccattgttgctcccgttgggctgtttttcgggcgcatggccaattttatcaacggggaattgtatgggcgcgttgtcccgcccggctcttcccagggaatgatttttccggcggagctttcccaggatccggacttgttcgtgcgggtagcttcccgtatttatgaaacgcccggattgctggacaaactgtccctttccggcatagccgtgccggaacgaatgactgccgcctgggtgaccgaccgggtgagggatacgcccgccatcagggaaatcgtggggcagatgatgcaggatcatgcacgctacccctcccagctgtatgaagcgtttgcggaaggtgtgcttctctttgccgtgctgtggtttgtacgggtaaggttccctcgtgcgtggaacggcttgttctgcggtatctttgccgttctttatgctgcgggcagaattatttgcgaagagtaccgggagccggattcccccttctccatgggattgacccgcgggcagttcctctccgttttcctcgtgctggtgggcgccgctttcttcgtatatgccttcaagaccaggcagacggttcaggaatgcgctttctatgaacctgaaaagaaagacgggaaagaatcgtccggaaaggccgtttaaaacgggtccaggtcaaattcccctgttttgggaatactgctggcgggaccagccttgaaaatatctgcaatgcagttggaaaaaagccgcaaattccgttggtcgaaggcaaaacgttcaaattcctttacggaaaacagggtgatgggatccgtgttgtaagctttgaattccatgatgctggcgtccgtattcgtatttgacaggcgtccctcaatgcctacgtccccgctcatgaagcgccccaggatcagggaggttcccggaaggggggagactagggaaacaagatcggacatgatgttgccgcccacgtccgtaggcttcagcttgactatggcgaggctgagagttacagatcccggaacggggcggtcaaccaactgccatttcatcctcccgcctgtctgtctggatttgttttccaacacgttgcggatgtctttctgcagcccggccctgaattgtgccgccagggacggggattccttggggaatctggctttgatatagtcaatattgacgggggctacatatactttcagccttggagaattccagacggcctgttccgagggattataccagacgcctccaaaacagctctgcctggagtccgcgtgaaggggatgggtaattaaaggggaaacgggcattgtccgggaactggaacaggaaaaaaccaaacctgttcccagcgccaggaatagccgtggaatagcgccgtgcatgcagaataagacggtatccgcccgggtggtgttcgagtcatgacccgattggcgccagggggggccggagggggtggctccggaaattccggggcggttttgtgcctcctaacggacgggtggcgggccggcagggaatgggcgaatggcataagaatagccggagcggggaaacggcacggtcagaagaactccggacgacaaggaaacgcgcaaggttgccccgtgtccggatgcatgattgacaagccggaaaagcggggcatgctgttgatatgagatacgagccgcttccttcttccttttttgcaagcaaccgtgaagaacttgcttcccgcctgcctgcaagcagtatgctgattctgcacgccaacgacgtatttcctacgaatgcggacggcacttttgccctgcatcagaatgccaacctcttttatcttacgggagttgaccaggaagaaaccgtcctggtcatgaccatccgggaggacggctgggatgagatcctgctgttgcgtgagacaaatgaacagattgccatctgggaaggcgcccggctctcgcaggaacaggcgagagagctgagcggcatccaggacgtgcgctggaccgatgaatatgatgcgctgctggaggccctggtgccgtccgcatccatggtctttgtggaagccaaccagcatccgcgatgcacatgcccggtggaaacgcgcaatgcccgcatgaccaaggagctgaaggaaaaattcccggacgctgttttgaagaatgtctatgaaatcttggcggacatgcggcaaatcaaaaagccggaagaaatcaaggctctcaaaaaagcctgcgacatcaccaatgaaggcttccgggaattgctccggttcatcaggccgggggtgggcgaatggcagattgagggattcctggccaacgaattcatcagccgcggtccgcgcaaattctccttcctgcccatcatcgcttccggaaaggatacctgtgtgctgcattatatccaaaacgacaaacggtgcgaagacggcgatctggtgcttatggacataggcacggaatacgggaattacaactccgacatgacccgcaccgttcccgtgaacggaaaattcactccccgccagcgcgctgtgtatgaaagcgtgctgaatatgatgacctacgccaaaaagattctgaaacccggaatcctgaaatcggagtacgaacgcctggtgcgcgtttttgccgccggggaactcgtcaagctggggctgatcacacccgcgcaggtggcggaaaaaccgtccgatcctcccattgtccggaaatattacatgcacgggtgttcccacttcctggggctggatgtgcacgatgtgggcgaagccaaccccgttgtgttgccgggcatggttttcaccgtggaaccgggcatctatattgcggaagaaggcataggcatccgtttggaaaacgacgtcctgatcggggaaacagaaaacatcgacctgttgggagacgtgcctttgctgcctgatgacattgaacggctcatggcccggtaaaatgggccggatacggttctgaacttgacaatggggcccgtgtgggttttcattcccgtcccatcatgtcgaagaaactcaaaatagctcttcccaaaggcagtttgcaggattccaccgtggaattgttccgcaaggcaggctacaatgtgtatgtgtccagccgcggataccgcccgacctgcgacgacgacgatctggagctcttcctgatccgtgcccaggaaataggccgttatgtcaatgacggtttcatcgactgcggcattaccgggcgcgactggatttatgaaaacagggcggacgtggaagtgctgacggatcttcaatactccaaggctacctccaagcctacccgctgggtgctggtggtcccggaaaattcccccattacctgtgcggaagaccttcagggcaagcgcatcgccacggaaggcgtgggcatcacggaacgctggcttcaggaaaagggtattgaagcccacgtggaattctcctggggagctacggaagtgaaggtgccggaactggtggacgccattgtggacatcacggaaacgggaagctccatcaaggccaacaagctccgcatcgtggacaccctgatgacctcctatccccagtttatcgcgaaccgggaaaccatgcaggacgagtggaaaaaacagaagctggaacgtctggtcatgatgctcaagggcgctctggaagcgcgccggaaagtgggtctgaaaatgaaccttcctgctgcttccctgaacggcctggtagaggcccttccgtctctgcgccgtcccactatttcccatttggcggaagaaggctggctggccgtggaaacggtcattgacgaatccgttgtgagggatatcattccccagctcaaggccctgggagcggaaggcatcattgaatacccgcttaacaagctggtttactagatttttttctcaccacagtaaaacaacaaacgaaccacaatcatgggatcgctcaaaaaacgccgtaaagcaaaaatcaacaagcataagcgcagcaagcgcatgcgtcagaaccgtcacaagaagcgtttgcgttacaagtcctaaggtttgtgcgcttcgctgctcaaactggcagtctgtccgatttccggaaaattccggcgtcctccttatcacggaaggacgccgttttttatatggacacagcttttgcatcattctcatgaattcattgataaaactttttttatttttcaccgcctcatgacgatgatttgtaaaaattgtttcatgatttcctgaaataaaaaagtagtcgatgagagggagggactggaggaatttggactggctggaatcatatcaattttccgcatggaaaaagacggccatgtttttagtttttgattacctgatataaactcgtgcatggatttgtgcgtcacgggaatcgaacaggttatatctatggagacggttgcttaaaacaacgtctgtcttccatttctgttcccttttaaggaaaaccggaataatgctgatgagcggaatggagcctgcgcatattccataacgcaggggatgaaaaaacaggcggatgtctcgtgggccatccctccgggttgaaaggatgccttttttccggttttaacggcaggccatgtcagactgttccgcatcggcgttttacgccgccttttcttcccggaaccttttcaggggaatggtgatggtaaaaacagtttcccggtgggggatgctggagacggtgatggctccgtcgtgggcttccacggcgcgtttcacaatggagaggcctaggcccgttcccttgatttccgaggagtggtgggtttccacccggtaaaagcggttgaagaggaaggggatgctttccgcaggaatgcccacgcccgtatccgtgacggtgatgacgcaggcgtcctgtgttttggcggcggccacagtaatggaaagtcccggctccgtgttttgcttgagggcgttttccaccaaattgaacagaatttgcgtccagtaaaagggatctccataaagttcccaatccgtgggaatgtccatgtgcaggacggcctgttttttctcccggatggaatccagacgggagaagacgtcgtccgcgcaggaggtgaggcggaaccactgctccttcagaatcgccttgtggcctgattcgagtttggagatcatgagcatgtcttcaataatgttcatcagcctctggctgttctggtgcatgactccgatgaatttgcgggccagtccgggactttcctccaccagatcgtcctccatcaggttttccagatatcccacgatgatggtgaggggcgtacgcagctcgtgggaggcgtttgccacgaagtcccggcgcatctggttggtgaggtagttctgcgtgatgttgcgcagcaggatgcgcttttctctgattggggcgtccgtgatggcgctgtccagatgccacgccgtgatgccgttttgcacgccgccgggggaattggcggcgctcagcgtgaattccttggtgacggggccgtccgtatcgaatgcttcctgaacatgccccagcaattcctggttgcagaccagggcccccactttgcgcccttccagcttttcttcctgaaagagttctttggccagcgtattagccagcacgatgtgtccggatggaccgatgagcaggaaggcctctcccagagcttccaggaagcgccgtttgtccgcgatggcctgttcctgcgcttcttccccgcgcttcagcaggcgctgagcgtcccgcaaggcttttttccgggctttcatggcggaccgacatacctggaccagatgccagttcaggtacagggaggccagaataaggatggttaggatgtagtcgatggccgacatggaatcggagtgttaagccttttcctccgggatgcggcgtcccagcagggtaaagcggtagccgatgctgcggacggtttcaatgcagtccgcgtagggagccagtttctggcgcagccgcttcatgtgcgtgtccagcgtacggctctgggcctggtggctgtacccccatacgcaactgagcaggtcgttgcggttcagggtctggccctcccgttcaaccatatggatcatgagcttgaattccgtggccgtcaggtctacttcctccttgtcgatatagaatttgagggcgtttttgtcaaaagtgaaggggccgtattccgcaatgacgctgcccggcgtgtgctcgcaccgtttcagcacgctggccacgcgcaggacaagttccttggggctgaacggtttggtcacatagtcgtccgctcccagttccagcccctggatgcggtcttccgcctgggccttggctgtcaggaagatgacgggaatgttctgggtgcggctgtcccggcgcagttccctcagtacgccgtgtccgtccatgcccggcatcatctggtccagcaggatcagttccggcttgtcccggcgcgccacttccagcgcggtcaggccgtcataggccgccagggacgtatggcccgcacgttccagattataagccacaagatctgaaatggcgtggtcgtcttcagcgataagaatggttgccatgtctgttttttacgatgaaagaaagggcggtgtcccgatattagatgtgacgattcgttcacatttccccgcccgggaggcggttccggacagttaaagcctcttcttatgcaaacatactgtaacggaagcgtttccgttttgcaaggctggcccagattcaacttctcttccctgcgtcatgtgatacacttgccccgcaacagttgtattgttatgcgaagcgatagagttaaagcagggttcgagcgtgcgccgcaccgcagtttgatgcgtgccaccggaatgacggatgaggatttaagccgtcctttcattgccatttgcaattcttttaatgaagtgattccgggccatgtccacctgaacagggtggccgccctcatcaaggaggaggtacgcaaggccggaggaactcccgtggaattcaaccttcccggcgtttgtgacggcattgccatgggccacggcggcatgaagttttccctggccagccgtgagctgatcgcggacagcgtagagacgatgctgagcgcccatgcgtttgatgccatgatctgcatccctaattgcgacaagattgttcccggcatgattatgggcgccctgcgctgcaatattcccactattttctgtagcggcggtccgatggccgccggcatggcggaggacggcacggtgctggacctgaacagcgtgtttgaggctgtcgcccgctttaaggcaggcaagattaatgaggaggaacttcattccctggaatgccgcgcctgccccggcgccggttcctgctccggcatgtttacggccaattccatgaattgcctgagcgaggtgatcggcttggcccttcccggcaacggttccctgctggctacttcagaggaacgaaaggagttctggaagcagactgcacgccgcgccgtggagatggcgaaggcggacggccccctgccgcgagacatcgtaacccgtgacgctatcgacaatgctttcacaattgatatggccatgggcggcagttccaataccgtgctccatacgctggctatcgccagggaagccggcgtggagtatgacctccagcgcatcaatgatatttccaggcgaaccccgaatatttgcaaggtggctccttcctcccgcttccacatgcaggatgttttgcgtgcaggcggggtgagtgccatcattcatgaaattgccaggattcccggagcccttcatctggacgccatgaccgtcagcgggaaaacgctgggtgaaacagtggagggatgcggcattgcggatgaaaccgtgattcatccgttggaaaatgcctattcccgtgatggcggcctggcgattctgttcggcaatctggctgaggagggcgctgtggtgaaaaaggcgggtgtgcatccggatatgatgagtttccgcgggcccgccgtgattttcgagtctcaggaagaggcctgcgaaggcatcctggccgggaaggtaaagtccggcgatgtggttgtcatacgcaatgaaggacccaagggcggccccggcatgcaggaaatgctggctcccacttcctatattatggggcagggccttggcgcggaagtggcgcttattacggacggccgtttttccggagccacacacggagcctgtattggccatatttccccggaagcggcggaaggcggcctgatcggcctgctgaggaacggggatattattgagtattccattccggaccgcacgctgaacgtctgtttgagcgaggaggagatcgcacgccgccgtgcggattggaaacctacctataacagggtttcctcctcctggctgagccgttaccgccagcttgccacgaatgccagcaagggggcagtcctccggcgcggggaataatagtttcccttttaacagcagccgcttcccgtgatagccgggaagcggttttttatgcctgttttccttgctctgtagtctggcaggctgcatggtcggattgcccgcatccggcattgaaaaaactgcctgggtaaagcggaaccgcttcctgtgaagggaagcggttcctaatcaacaattcatgtttttccaagaaatgttttatttggaaattctgaggcggtcgctcatttttttcagggaaaggacaattagttcattttgagtggatggatagcgtttctttatttccgatggtgaaagtcgttttcccggagttggtgatggaaaggaagcgtcccttccgtctcgtcccgtttgccggaattatggataatagggtggaaacgggtttgagcggcgcgtacatttcgggaaaatagcctcttcctgcgcagagagggaaatgattttgtaaaaaattccgttgctgtccgttatgctgatgatgtaacccgttttcagtattcgcaggagggcgatcttgataagtctggtttaccggaactgatgttgcaggaaggctgcggaatgacgcaggacgggactaggacatggtgttccttgttgaaggaagcgttggagattgccttcccggttccctgcggaaccgggaaggccggaatggacatccgttagaatgagtaactgacggagccgttgattccctgggccgtcagtccggccctgctttccagagagtatccgatgcgggccccccacctgttgccgaaggcggcgcttatccctgcgttgacgcgcagagcggtgcggcctacgttgacgccgcgcgccgtccaggcgcccaggtcactgctgacagtccctttgggattgaggcggctgagatcctgcgtcacggcaactgtcacgctgggcgtcagcgtggcattggttcctgccgcgtaggtgcgggagagggtgatgcctacgggcagcgtccagttctgggcgcgcgctccactgaaggtccgggccaggtctccgtgttcggagaagctgtccgtttttccggtcatgaattccagcccggcaaatggtgcgatgaccagtttgttgcggaattgttccgtccaggtggcgtagatggcggctccgaaagagtcagagtcaaatttcccggcagcggaggtgtccgccaggcgggctttcccgtcaaaggatgtggttccgaaggctgcatacccgtccagagacaatttggaggttccggcgggcgtgtagcggccgtagagcatggccatgaaagaatccgcatcatagctggacagtcctcccttgtcctggaaagttccgtaagattggccgatggccactcctgccaggacggaggaggagagcttgcaatccgcgcccacggcatagccgcctgcgtcgtatttgtagccgtcaatgccgctgcgcgaatgttggtccgtccaggaacccaggccgcccacccatacggagccgcggcctgaagccaccggcgccatggcgatgggggaacccttggcgtctgcagactggacgggcttcgctgccgtaatattcagtccctgtgcggcggaaatggctccctgcgtcctgcccagtgcggcaaaacccttgagagcatcgttggaagcccaggccgcattgatcacggtttccccgctgacggattgaatcatggctgccgccgcgtctgcgctggaggttcccagaagggtttcgaagaacctgtgtgcggctgaaccgtcccggacgcccgtccggacctgttccatgccggctgctgcgccggatatgttcccggaatatccctgcatgggggcggcgactccgtgcatattttgtgtcaggcggatagttccgttttcatggggcgttgcgcttgtggagacgaaagcggtgttgaacagaggcagttcgcttacttcggctccggtgatggtgacgttgtccacggaagaagttccggcggcggtgtgtgtgaggtcgcggccgttgcccgcttcatcgacattccagagcttgatggaggagtggccgttgaacgcgatgtcattgaggagcagggaggaaccttcccccatttcaatcacggcgtttccgttaatttccaacgtgtctccagccagtacggaatcttccgtcagaatgacgcctgcgccattcatttcgtagtccgtcaggtcttcaactcccaattgagctccttccatgaccatgatgtcatccacttcggccaggtggcccacgatcagggagccggctccggattgctggatcaatgttccgccgaatccgttatcctccgtgtcccggcctccgtaaagcaggtcgccgccgcctgtctgaatcagcgtggcggcgccgcgcgtccacggaccgtcgtcaagggagtaatagtctgcgtcggaaatgccgctgttgatgatggtgatatcgttcgcgtccgtgtccgccagaatgacggagccgtcttccgcaaagatgtcgttagcttcttccccggccgtgttgccgtcaaagaaggctccagagccaatcagaagaatgcggttctccatcaggtggatggcgcctcccagcccggaggcggcattatccgtgaaggtgacgtccctgccgagccagatattggccccttcattttcaaagaggtcctccacattgtcgccatcctgctgcgcgaggttgctcgtcagttcggaagcgatggccccgccattggctccagccgtgttgccggagaagacagttccgtttcctaccgtgatatccagcacttccgtggtcagtttggaggtgcgttccccgtccgtataggttatggattcggcaatattgttctgggcgaaaacggctccgccggatcccgctgccgtattgctgatgaagctgttgttttctccaataacgatgtctccatgtgcatagagggcgcctcccctggagatatccatggcagcggacctgcccggggccttgctggtcatgaatgtgttgccgcggcccgtggtgattttgttttcgcgttccgtgacggtaactgttccgttgagaatatttccgttttcatccgtatcaatgatgctggcgcggataaggctgttgtccgcatcgctgaaggcgctcatgtggtaaacgggagcatcttccgttccctgataagttacattgtcccccagcgtgatggtattttccgcagctacggtggtcatggtcagcgtaacattgtctccaatgactacgttcccgccataagttccttccgcatattctccggaagccagcacatagtctccttccacgttttgcttgagcgtcccttcaaaggagacggttccacgggtggaagcgccgtcgtctccaatggagccaaccgtgtcccctgcccagatatcggccatctggctgccggaaagatcgttgtcgcctgtaatttcagtattgcttccgatatagatattccctccttccgcgtaaatatccacatcgtccagcgtagagtttgctccaatggagacggtggcctggtctcccgctccggtggtcatgcgcacggtgcggattccgtcttctccttcggttatggacagggaatccagttccacggatacggcatccagtgtgacggatgtcagttttgccccttcgccgatgaagatggaaccttgcgcatccatgtcatagttttcaatggaactgccgttgccgacggtgatgtctccgaacagccccatggtttcctccatgctggttccgggaaggtaggttccgtcttcaccttgtctggcaatgccctgggaaaggacaagggcttctgtcgtgatttccgccctctccttggctgtcagcgtactgttatctcccagcagtatttcacccccagtggattggctatcgccgcccacggtgctcaggttcgtatcctgcatcgtcacggctcccgcgctgaagtcgatccctccgtgagcgccgacggtttccgactgaccgatcaggacgctggaatcttcattttcataaacggatgtcgtattgacggcgcctgtagagatgagcgtggaatcagataaggaaatatctccatgggaaacaatttggccgcggactccatcattcatggataaatccatttcatggatacggacgttttttcccagatccatggcaatttctcccggtgtagcggtgactaccgtggagatgagggctcctgtttcgggatcaattctggtttctatggaggcggaatgcccggtagtgacctcattccgtctgagaacggctccgtctccggccaccagcttgttgttttccagcacaagccaggttccttccagcgtggaagcgttttctatggaaagggtgtttccttcttcgtcccatccgctgagcatgccttccgtcatgttgcccacgtgaacggttccacggccgctcacgttaagatgctgcatgttcacggcagacatgtccttgtagttgaagttggagatgcttcctttcccgtctgatttgaggacaatggaggcgtctgcgggcagggagcccaattctactccttcaaagtcaatggagccggtaatggtcaacgtgtctccatcagccatctggttccaggctgtttgaaattcttccagggtggaagctgtatattcggcggcgaaggtttggcttccaaggacgcacatggctgccagaagggcccggcgcaacgggaggggtaaacgaaggttcatggtttgttatattcagattaattcagggaaaagtggagatgaatgacttttccctgctgtttatgtacaggattgttaatcctgtgtttctgaatatatcccattcgttttttccgctttgggcacataaatgctcatggtgcctcggaagattgaatcaacggtttatctaacaaatagaattgtggttgtacataaagaattgtccgtaaaaagagattaatggataaaaatattgtaattttttcttgataacaggattaacaatcctgtgatgtatcaggtattaatataaaaaacatgatattcggaatggcgagacatggaaaaaaccagaaggaatatctggctgcggaaatgttattgaaaggtagcggattgaatatgctggatgctgccagcctcgcagtagagctgctgagcctgtgcggaggcagccgcagcatgcgccgggccagaaaggcaatttttctgggtgctgaggaattgaggaaaggggaaaggacggtttccttttccgccgccgtggaagaaatgctgaaggcgaagcgtaatcttcgccctacgacgttgcgcgatatcaggtatttcaccggagctttgatgcggaggtgtccggaattgaaaggttttccggtccggaagctgacgccggagcattgcgcccattttctggaggctgcttttacatcccacaggcagcgttacaagggccgggcggtgatgagcggcgttttgtccttttccctgcggcacggatggtgcggggaaaatcctgtcgcccgtgtggactctccttcgtttcgtgaacggacgattgccattttggctccggaagagataggaagccttcggacggtggtggaagctccggaatttcgtgactgcgctccggctgtttgggtaatgttgtacgccggaatcaggccgggggaggtggtgcgcctccattggcgtgatgtggatttggaggagagggtcatttccgtaaggtcccgaaccagtaaaacggggggaatcaggcatgtcaccattcatgctgtgctctggcggcttctggcgggatacggagcaggggggccggccggactgttatgtcctcccaattggccggtgcgctggaggctgctccggaaaaaagccggatgggggctgcacaaccgctttggagaatggagtgcggacgcgctgaggcatacttatgcttcctatcacgccaaatggttcagggatttttccctgcttcagctggagatggggcatcgttcctcctccctgttgcgggagcggtacctgaacatggaaggggtgagccgcgacagggcacgccttttctgggaagcgccggaacatggctggaacaacaaaatcggcattgcaggaacggactttctatgaagggacggctgtttgactgccgcagccggaaaagggcggcatgagggagtccccatggttatgccctgggcaggaagtagccgcgctgtttttctgagatgggcatgtccaggcgttccataacggccagcatgtcttcccataccttgcgtttttcccgcgggctgtccgatctgagcagataactgggatggtaagtgacgcgtacgggaatgccgttaaggtcgtggaacctgccgcgcatggaactgacggatccctgttcccccaacaggcctacggcggcggtaccgcccagggctacaatcattttcggctggatgacccggatttcatgcatgatgatgggcaggcatgcttcaatttcttccggcgtgggtgcacggttattggtccgctggttggggagggccgggcggaatttgacgatattggaaatatagaccatgtctctggagagccccatggcccttaatatctggttgagtttttccccggcacggcccacaaagggctcctgctgcacttcttcataatatccgggagcttccccgatgagcatgagtttcgtatggggattgcccgtggcaaagaccatggtgtcccgcagggagttgagttcccgcgccggtttccagttctgcgccagattacggaggtattgcagcttgtcttccattgtcccttccgggagggtaatggcagaggccggttccctgttttgcggaaacagctccggcggttccggctttacggcaggagcggagacaggagcggctgcctgcaggggcggcggttctggagaagcgggtgctgatgcggcgggacggcctccctgcctggaagccacgtaccatgttctgagaacgtttctggcttcatccgtcaggctcgttcgcgttgttccctgctggatcagggaatcaagataatggcggaaaaggctgttcggtgtagcgctcatgggaggataaagccagattagtccataagaggccgtctgtcacgacgattcgcaggctccccggccttcatggaacgctcctctccgggaaatgacacggtaaaagatggtatcttttgcaagggaggtagcaaattggggctttccggttcaggaatggaaatgcagctagctctctcaaaattttacttagtttacgtatgtctttttctgaagaattaaacggtttgatggattgccccactcccctggtacgccgtttcatggcgttgctggaaccggttgacgacgcccgcctggaggagatggcgcaggagagccagcgtctgacgcggctgcatttcggccggaccatccgcctgttcgcccccatttacctgtccaacgaatgcatcaataattgcaagtactgcggtttttcccgggataatcccattatccgcaccacgcttacggtggatgaagtggtgcaggaggcccgctacctgcacggcctggggctgcgcagcatcctgctggtggccggggagcatcccaagttcgtttctgacgggtatatgcaggaatgcctggacgccctgcattcctttattccatccctggggctggagatagggccgttgccggacgaccgttatgcggagatcgtccgccatggggcggaacaattggccgtgtatcaggaaacctataaccgggaagtgtatgaaaccctgcatacggcagggatgaagaaaaatttcaactggaggctggactgcccggaacgcgcctaccagggcggtttccgccgcattcagataggagccttgttcgggctttcgccgtggcggcgggaggccatggcacttgccgtccatctggattacctgcagaagcattgctggaaatccgcgctttccgtggcgtttccgcgcatgcgtccctacgccgggaattacgagtatgaacctgatccggacttgatgctggatgaccgccattttgtccagcttatggccgccctgcgcatctgtttccccaagataggcatgtccatcagcacccgtgagcccgcgccgatgaggaatgccctgatgcatttgggcatgacccacatgtccgccattgcgcgcacggaaccggggggctacacgggcgtgggaacggctgccgcccatttgacggtgcggggcaaccgggtggatcttcccgatggccggaaagggaattgcaaggcgacggagcagtttgagatttccgaccagcgcacaccggagcaggtggtcggagccatacggaatgccgggctggagcctgtctggaaagactgggatgccgctctggatgtggtgtaggagaaccttctcccgtctcatttctctggaatgacatccatatcgccgtgatgttgtgatggagcattgacggcatgctccggctggcatatttccggtagcgatgattcgttattattgggggaggttttggccgttcttcctgtttgcgttcggcattgaggcggtggaaaatctgtttacggtatttttcgaataccgcaacatggatttcgggttgcttcccctcctgaaaacggcgtacgtttttgtgacggagtttgccgtcaccatgtgctactggcttattccctatgccgtttatttgtggattctgccgcgcgggaaagcaggagggaaggcggacaggtggctcacctccgcatggtttttcctgtttgtgctcgccaatctgtttgaagatgtggcggaagcttttttctggaacgagtttgaagccagcttcaatttcattgcggtggattacctggtttacaccaaggaggttatcgggaatatttacgagtcctatcccatcattcctattctgggcggcattctggcggtgtccgttctggccgtctggggaatgaagaggttcctgcttcccaggaacggggcggttcccgtcggatggaaacgaggctgtgtggtgctgttcctgctggcctgcgtcacggggggatattggctggtggatatcaaggatgcggatgccgtgaacaaccgttataattcggaaatggccaaggatggcctttacagcctgttcagcgcctttctcaagaatgaactggattaccgcgcttattaccggacgctgccggatgcggaagcggcggcgtttctggcccgggagttcacggcggatgacacgtccgtgccggaggcttcgtccggcagcgtaaagaggcaggtgcgtccttccgggggggctatccgcccgaatgtcgtggttgtggtcatggagagcatgggagcgggatttttgaacgagtgccgggaagacggggctgacgtcactccgtgcctgagccgtctgggaaaggaaggcatttttttcccgaatacttatgccacgggcacccgttccgtacgcgggctggaagcaatcagcacatccctgccgccgcttcccggcatgtccatccttcgccaggaaggaaatgagcatttgcagaccataggttccatattcagggacaagggatatgatctcaaatggatttacggcggctacgggtattttgacaacatgaattattttttcgggaacaacggatttcaggttctggaccgtaattccatggatgattccgaggtgacccattccactatttggggcgtttgcgatgaagatttgttccgccgcgccgtacgggaggcggatgaatcctgcggacgcggcaagccgtttttgcaggtggtgtttaccacgtccaaccaccgcccctacacgtatccggaagggcgcattgacattccttcccacacggggcgcatgggggccgtgaaatacgcggattatgcggtaggcgcctttgtggaggaggccagaaccaaaccctggtttgacaacacgctgttcgtgttcgtaggagaccacggcgccgggagcgcgggaaagcaggccctcaatccggaaacgcaccgcattttttccattttctacgctccggctctgctgaaaccggaacggcgggacactcccgtgagccagattgacgtgctgcccaccctgctggggctgttgaactggccgtatgatgcggccttttatgggaaggatgccttgaagccttcctatcaatcccggtattttgtgagcaattaccaatatatcggctatttgaaggggaaagacatggtggtgctcaaaccccagcacggagtggaatttttccgggacggagaggccgttgagccggacgggcggatgaaagagctggaaagggaagcggtttattactatcagcacgcttccggctggcgcaccagtttgaaagaataaggctccgcaaggtgcgaaggccgtgattgtggcggcctccgcccgcgcatggaaaatgcgttcaggatttgcttccgtccctgtaatcctggagagcgtcccaatggaacgtgaaatgcttctgcatgtgcagcccgttggcgagaatgaacatgagggaaatgcggaattcgttattgttcaatccttccagctcttttttgtcaattttcatggagaatttcccgctcttttttccaaggcgccgggagaaggaaacggcgtcatagtcctggttgaccgcataaggaggatcctggatgtaaacattcagagctttgacggtctgggggcttttataattgccggaaaccagaatctggtctcctttaaaagaaatggctacgtccccgacctccacttccggcttgccttcgtagaattgctgggacggggtgacggaaaacacttcacaggcatccagcagggcgcagctggccggggtcaggaacgtgggactggtcccgaacgtgtaattgcccgaacccatcagggccgtgccgtattttttaccgtccgaggcggtttggtggttgtgcggcagattaaggccgtgccccaattcgtgggccatgcctccgtaccatttggtcagcagccttccttcccttgttttctgccccaggtgtttgatatcgaaggccggataatccagggcgaaacagttgcgccccatgccgtaaaagggaactccgccgggattgtcggggccgttcttttcgtcattccaggtgggcatgatgatgagcgtgtgctggctttttttcctgtccggatgggctttgaaaaattcgtcaagttcctgggccgctttccagccgcctccgttttcataaggataatgggccgccggatttttggccttgtattcaatgatgttcacgcggcctggggatttgatgtccaggccgaaggaacgcgcgccatagccatgccgctgcatttccttgccgtaaaactgctggaggtaaaggagcagttcgctgaggcgccgttcataatccggaacgggttccgtatcactgcccagaaaataaacgatattgagctgacgggccgtttttttcagggcaatccggtctttcagggcgtccggaacggtgacttccgcaaaggatgtcccggaggccgctcccagaaagaacagagaaaaaaatgcggagagaagtcgtttcaacatacatgccaaagtaggggcgtcatttttaaagacaaggaaatttactgttctcgccgccattggaggaagcgtccctgggccgggagggaaataatgggggaaagaatccgtcatgtggcggccgataagttcggaatggctgaaagatagaggttgcgaaggcagtaaatatgtgacattgtttattaaagcatgcatttccaatctctatatttatctgccgtggcggtaagtgccgtttctttcgggtggggggctctggataagccttccgcctctaatttgatctggtctgatgaaccggccgtagttgtttatccgcaggaagacaaaaattccgagggcagttttggcaagtacagaaagcctgcctccgtctgggaagcggaggggtatcccattggcaatggtcgcgttggagccatgattttcagcgctcccggccgcgagcggctggccctgaatgaaatcagcctttggtccggaggagccaatccggggggagggtacggttacgggcctgatgccggaacgaaccagttcggcaactatcttccctttggggatttgtttgtggactttaaaaaaggcgaccagccggcttccctgtctgtggaagattttacgcgctccctggatctccgggacggcattcataaagtgaattacaaggcggacggcgtaacgtatgaccgggaggcattctccagcacgcctgccaacgtcctggtgctgaactataaagccagcaaacccggccaattcagcgcggatttttccgttaacagccagcttggagcagatatttccgccaagggatccgtcatcacctggaaggggatgttgaaaaacggcatgaattatgaaggccgcgttttgatccgtcccaaaggcggtacgctttctgcctcgggagataaaatttccgtgaaaaatgcggattcctgcatggtcgtcatcgccatggagacggattacctgatggattataaaaaggactggaagggtgaatctccctccaggaagctggaccgttatgcggccaaagccgcttctgcggattatgccgccctgaaacaggcccacatttcccagtacaagtccatgtttgaccgggtgaaggtcaacttcggaaaaacggaggaggatgtagccaagctgcctacgccaaagcgtctggaggcctataagaaaaatccggcagaccccgatctggaggaaaccatgttccagttcggccgctatctgctgttgtccagttcccggcccggcacgctcccggccaacctgcaggggttgtggaatgattatgtcaaaccgccgtgggcctgcgactaccataacaacatcaacgtccagatggcgtattggggggcggaacccgccaatctttccgaatgccatgaggccctggtcaattatgtggaggcaatggctcccggctgccgggacgcttcccaggcgaacaaggggttcaataccaaggacggcaaacccgtgcgcggctggacggtgcgcacctcccagaatatcttcggtggcaacggctggcagtggaacattcccggtgcggcctggtatgcgctgcatatatgggaacattatgcatttaccggtgatagaaagtatctggaaaaacaggcgtatcccctgatgaaggaaatctgtcatttctgggaagaccatttgaaggaactgggagccgggggcgaagggttcaagacaaacggcaaggatccgagcgaagaggagaagaaggatctggccgatgtgaaagccggaactctggtggctcccaatggctggtctcccgaacatgggccgcgtgaagacggtgtgatgcatgaccagcagctcattgcggagcttttctccaataccatcaaagccgcccgcattctgggcaaggacgccgcctgggccaagagcctggagggcaagctgaaaaggctggccggcaacaagataggcaaggaaggaaatcttcaggaatggatgattgaccgcattcccaagacggaccaccgccatacgtcccacctttttgccgttttccccggcaaccagatcagcaagctcaagacgcccaagctggcggaagccgcccgcctttccctggagtggcgcggcacgaccggagacagccgccgttcctggacgtggccgtggcgcacggctctgtgggcccgcctgggcgaggggaacaaggctcatgaaatggttcagggactcttgaaattcaacactttgccgaatatgttgactactcatccccctatgcagatggacggcaacttcggcattgtaggcggcatttgtgaaatgttggtgcaatcccatgccgggggcctggacatcatgccctctcccgtggaagcgtggcctgaaggttccgtgaaagggctgaaagcccggggcaacgtcacggtggatttttcctggaaggacggcaaggtaagcaacgtgaagttgtattccgcccaacccaaggtgttgcccgtgcgcgtcaacgggaagatgacccgcatgaaaaccctgccgctgaaatcgggagcgggatcttcgcagcccgcggcccggtaaaaaaggaaatccataatccggttttagttccggaactaaaagtagtcgtggcttccagtcctttcgttagggctgggagccttttttatcccggacttttgcgggagggacagtgtttgtttcaaaagaagagcctgctgaatggcgcgttccgaaagaaggaattcctctctggatgtaaagattgggaagggttttcgcagggggcggtccttcgccccgtcttaaggaaagaagggctgcgctctcatttcttttccatctgcctgagcagggagcaaatggcgcaggaatggagggaacacaggtcttcgtgaatttgaagcaatgcctggtggtgccaggctttcgcaagaaaggcgtgtgcatccggcctgccgcccagcagggattggtggacggagagtacttttgttcccgcctgtccggcccggagggaaagataatgcttccatgcatgttcgtcatctttcatcggaagaaggtggttgatgatgaagtccagaattctatcccggcccatcagggccatggggcggggagacggtggggaaggaagcgttacatgggtgctccagtaggggtgtgtaagggaggagaggtacttcgtcagctcttccgtatgtccggcaaggcaaaggcgcttaaacgcatcaaaatctgctgcgatgacggccagagcccctacgcgcctctgcggatggttggccggcctgttgccggaatacgtccagggaaaggagcggtccggcgccagttcaaattgcgcccgcaggggccaccattgagcccagagttttttgtggagttctacggcttccggtgtgcaggaggccggaagaacgggaaggaggaagcccgccgtaccgaaaagcagggcttccggacagttccggatggaacgcaggggcgcccgcagggccaggtggcgcatggcggttttgttggcgtgatagcccagcgtttccgccaggttttcaaaaagggcctgttcctctcctgcgtatttggcgcgttccgcatggcggcggtgcttgttccggaacctgtaggctgccgctgattggaggagtgtttccagaaactccggagccatggatgccagcagtccggagtggcggcagtggcgtaccggggcgttgccggaaggggatgttcctgaccgcgccagcgcagcggggggaatgacagccagaggaacgcgttcatgtctggcattgcgggtgaaccatttcctgcggctgggcgcgcaggcgaggtgcaggataacaccgttgaaccccgggttggaaccgtgcccgtggcgttcccagtcttccggcgtgggatccagttcgatatctcccgattgcgggacgccattaatgcatatcctggcgtttagaaagtccggtccggcggatttattccagttcccgaaatccagaatgtgaacgtccctgcctgaatcatccgtaaaagaggttccaaatactccttccagaagaagaagctgaagagtccgctcgtccggaagggcggaatgattggaaacggaatgttccctgacggcggcaagcccttcttcccttgctgcggaaagggcttcctcatacagggaggccatggagcgcaggtccatgtggaggggaggtatttttattgatctttctgccgttccaattcttctttcaggcagtcggttacgttgcggaatttttcttcgttctcttcgctcatttcgctcagggtcaaatgggagttgagaacgtggagagtttgctccttggcatccaagtgaacggaaggggcattttcagtacccagggcggcacgtatctgctctacttttcccctccagggggctgtgggcggttcaatgctgagcagggcgtccagccccaggctttccagggcgctcaggcagcgttcgctcggggaagcgatttggacggatcctccgatgggaagcagccgtcgggacaggcccgcaagagtgcccatgaaggtggagtcaatgccggagcaagtttccagatcaatgacgatcagacgccctccggaagcgatgtaatcgtcccccagggatttgacagtcggactattggcaaaacttccgcgtccggaacaccggacccaaagaaattcatcaaaaaggccgaaaaggatggaagaattgttattcacgtcgttagaaaatggaaaccatatgaataacaagagaaacctctgcggtcaagtcaggatttaatttgcgcgccgccggaagaaggttcgttttctcgcatgcagaaccttttcccgcggcgctcttttcgttattcggagggatgcctcaggagttcttggtgccttcccccgtaccaggcaggaaacggtaataggtttccagcatcagcgttgccaggcactggcggtagatgttttcagatttattgctcatgccggaaacgtatcctacgtcatttttccggaaactgccgtccgcattctggccgctgagcacggcgtcccggaatgctttgttgtaagaggtccatacgtctcctccgcggttcatggcagcctgcacgcagtagtaatgcatgtagagattactcttgacgttttccgtgccgcttccctggccccactggagggttttgacattgtttttgatccagtccagacccttgcgggcggcgctgtccgagccgttgcccgtcatttgcagggaaagcacgcctacgcctaccagggaggaacggggcatattaccgttttccttataggaaaatttgccgtccggcatgacgttcttgcgcacgtagcttgaggccttgcgcagcgtagagcggatttcccctttggtaggcttgatgccgccgtgttcggcagccttgagagcctgcacgttccacccggtgacggaaaggtcgatgtccggattaatcttgttgttgtagctgtagccccagcccccgttgggacactgggcgtcaataatcctgtccacggcttttacgacgaccttttccagattggagatggaggggatgtccatctgtttgcagaaggtataggcttcgcacagggcataggtggctaccgcgtggtcataacagatttccttcagggcgggctgttccgaaaggacggggtttttcatgcctaagtccaccaggaaggaaatgcctttcaggacgttttctccgaattcctcggaaagaggggtttcacagtgggccaggtaggccagcagggaaatgccggtcatggaagcgcggaattgcccttcaccccaggagccgttgccgttctgctgttttttcagccagcggagggatttgactacggcttcctcgcactgcggggtgcccccgttttccgtgatgcgcttcatgcggtcgttcaaatcgcagcgcttggagatgatgccgggaatgcctcccccgtctccgtcgcccgtgccggtgccgaagccgtcgccgatatcgatgcccatagagagttcttccgaggggacgtccacctcaatatccgggttgaccaccgcgacgtccgccgtggcgacggcggcgatgaccttcacctgcgcggaggtggaggaactgctggggcgctgggtggtctgggtgacttccggcgtgtcgatgtccgggttgtcgccttcctgggtggcgtaggcgaccatggggggatcttccggaacggccacgatgatgtgcaccaggtagaggaggaggcccatgagggcgatgccgaggaaggagacggaaatggcggcggttagtgtcttggtccgctgcttcttcaattccgcaagggcattttcagtactttcaatgtggagactcatagagggaggtgtctggttggcatcaaggcaaaaactcccgcatttctgaaaaatggggagaattgccctgtacaggtatgtattgctggcctgcctgtttacaaggctggcagcatactaaagccagacacgcctgtctgtcaatcagattaggaattcctggtgccttcccccgtgccgggaaggaagcggtaatacacctccagcatcagcgtagcgaggcactggcggtaaattttgtcgttgatggaacctccattgctgttcacgagaccccccggtcccgggaatccgttcggggtgaagcttccatcggtggcctgggctccgagggtggaatcacggaaggccttgttgtacgctttccatacatcccctccgcggttcatggcggcctgtaccccgtaatagtgctggtagaggttggaggaagtattgttcgccttccagttgaacggctggttggtgttcttaagcatccagtccagtcccttgcgggcggcgctgtccgaaccgttgccgcacatttgaagggaaagaacgcctacgcccaccagggagggacgtgctgcggcgtcttccctgccttcctgcatgtaggtgaagaggccgtcgggcttgccgcatttccggcaataggccgcggctttgcgcagggccgtgcgtatttcgcctttggaggggcggatgccgccgtgttcggcggccttgagggcctgtacgttccatccggtgacggaaaggtccgtatgagcgcccgccttcgtgttgtaattgtaggcccagccgccgtcggtattttgattgtccacaatcttatcaacggcctttatgacgactttttccagattggagatggaggggatgtccatctgcttgcagaaagtgtaggcttcgcacagggcataggtggctaccgcgtggtcatagctgacttcgttcctctggggaaccagggagagaacgggatttttcatgccctgatccaccaggaaagagatgcccttcaggacagtttccccgaattcttcggaaagaggcgtttcgcagtgggccaggtaggagaggagagccatgcccgtcatggcgcatttgtaattatggggagccccgccccaggaaccgtctttattctgctgttttttcagccagcggagggatttgactacggcttcctcgcactgcggggtgcccccgttttccgtgatgcgcttcatgcggtcgttcaaatcgcagcgcttggagatgatgccgggaatgcctcccccgtctccgtcgcccgtgccggtgccgaagccgtcgccgatatcgatgcccatagagagttcttccgaggggacgtccacctcaatatccgggttgaccaccgcgacgtccgccgtggcgacggcggcgatgaccttcacctgcgcggaggtggaggaactgctggggcgctgggtggtctgggtgacttccggcgtgtcgatgtccgggttgtcgccttcctgggtggcgtaggcgaccatggggggatcttccggaacggccacgatgatgtgcaccaggtagaggaggaggcccatgagggcgatgccgaggaaggagacggaaatggcggcggttagtgtcttggtccgctgcttcttcaattccgcaagggcattttcagtactttcaatatgcaggctcatacagtatgtgaagcttcctgaaaataatagaatgtttttccggttgaggcgagttcaaaaattttgatggtctatagggtggtaaatgaccagatatgaacaaaatggaattttataatgaacggcttatattggttgcatcatatacccgacgggggcgtctgccgggacatgggctgtgtttctggtttgccggagaggaatggaaaaggctttttgaagccgggaaggagaagcagcacgccgggaaccgtttgcctttgaatgtttttagctgtggcaagcagaggaagaaagagcggttccgggagaggagcgtacgaagaaatttgaaaaaacaagccctgccatggagggcatggcagggcggaaaagaaggtggccttttgcgggcagaggcattaatagtggccgcggcgcgggccggtcatccacttccatgcggtttccacaatggcctcggcatccttgcacttggcttcccagccgaggatttccttggctttcttcggattggcaatcaggcggggcgggtcgccttcgcggcgcgggccgtagtggacgggaatttttttgccggtgactttttcagccgtttccaggatttcccggacggaaagtcccaggccggttccgaggttgaagcattctgtggccccgcctttcatcaggtagtccaccgctttcaagtgggcgtccgccaggtcgttgacgtggatgtagtcgcggatgcaggtgccgtccggcgtgtcgtaatccgttccgaagacttcgatgtattccttttccccggtgagcgtgagcaggatgttggggataaggtgggtttccggttcgtggtcttcaccgatcaagccgtcctcgctgcagcctgaggcattaaaatagcgcagaaaaacgcttttgagaccccaggcgcggtcgcagtccctgcaaactttttccagcatgtacttggaactcccgtaaggattgataggatcctgcttttccgtttccgggatagggatctgggtgggaacgccatacgtggcgcaggtggaggagaaaacaaagcgcttgacgccagcggcttgcatggcgcccagaaggacgaggggcttggcgatgttgttcatgtagtacttgagggggttctggacggattcccccacattgatgaaggcggcaaagtgaatcacggcgtcaaagttgcccttcatcaggagaggatataccacggaggcatctcccaaatcccctttgaccagtttcacttccgggtccacgagggctcccgcgtggccgtacaccatgttgtccagcacggtcacgtctgcgccggttttgacgagctggcgtaccgtgtgggaaccaatatatccggctccgccggttacaagtactttcatgattttatcaaatttgctgttgagccggtttaactttttctccggcaaaggcgtccggacattttggagtctgcggaaccttccggttcactgcaggctgaatccctgttccagacgcctgtaaaagtgacatgttttcccctttttgtcaatttgcgatatatcttgccgccgtctctccgttctttgcctgcggcggttggagcttctccgttttcatgccggaaactgccccgctttttactggctcctgacaggcatttttgcgaacatcacttcattatgaaaccgtccgagatcaggaatgttctggaagaccatgaagtgcgccccagcaagtccctggggcagaatttcctgacggatgaaaatgtggcccgctggattgtggagcagctcgaaatccggccgcaggattgcgtggtggaggtagggcctggaaccggctccctgacggaacatgccgtacccctttgccgcaaactggttctggtggaatttgattcccgtctggcggagtaccagaaagagcgctgggccggtgatccccatgtggaggttcaccatgcagacggcgcttcctgggatccgcgggggctgtttgcggaggcccctgtcaaattccttggcaatcttccctattccgcggggggagccatcctccagaatttcctgtccaggcccagtgctgtggaacgtgccgtggtgatgctccagaaggagtttatcgaccgcattctggcgacgccggatgatgatgccttcgggctgttgtccttgcgcatccagaaaaactggattccccgtgcccttaaaaccattccgccggaagcgtttcatccccgtccgcgtattgattccaccgtgatgctgcttactccccgccctgcccgcgagctgcctccatatgacgaccgcctgatggatgaactgatgcgcaaggctttttcccagcggcgcaaacaattgaaaaaacagctccccgcttctcctccgtgggagggcgtggctgcttccctgggactttccccttccgccagggctgaggaattgaatttgtcccagtgggtggaattggcgcgcgtttatgataccaatcctctcaaggatgtggcgcagagcggagatgaattgtttgacatcgtggacgaactcaatcaggtgacggggcagggcacgcgccgggaaatacatgaaggcagccttcgtcatcgcgccgtacatatattcctggtcaataagcatggagctgtgcttctccagaaaaggtccctgtggaaagacaggcagccaggcaaatgggattcctccgcagccgggcatctggatgccggggaaagttatgaggaagctgcggtgcgggagctgaaggaagaactgggggtgtccggctgcgggctgcagaaaatcgcggattttgacgccggagaaaataacggctgggaattcatctccctctatgaagggcggtattccgggaaggttcgttttccggcggcggaggtggacagcgtgcagtggttcacgccggagcaaatccaggcgtgggtggaacgccgtccgcaggatttctcgcctgcgttcattccctgctggaatgcatggctggtcgcgaatagaaaaaatcattctaactcaaatacatatcatgataaaccctgatcaattatctccggaacagatccagtccatccggacctgggcggaagaaggactggatttaaacgccatccagaaaaggctgcatgaggacttgaacatcaagctgacgttcatggatacaagattccttcttcaggatctggatatccgcatcagccagccggagccggaacccgaagccgagcagcccggagagcttcccggaacaatgcctccccctgcctccctgctgggaaaaacccaggtaactgtggatgaaataacgcctccccacgccctgatggccggcaaggttttattcaagagcggcgcccagggcgcatgggatattgaccgtaccggccgtatcaactgggacgctacgcttggagaacctacggcagacgacctgagggaatttgaaacggaactgcaatccgtcattcgcagccgcatgggagccatgtgagggaaacggaaaatattccgcttgaaatggactggaagcaggaacttgtcgggtggcggttatttccaataaaagccttggctggaatgggaaatgccgcgtccgcatgccattcgggagagaatgtctgcccggaaaaaatgcgtgttcatttggttccatagtaaaataaaagcaacaaaaggactatcatggaaataccggaggaaatgattgaaacgctggtgcctgccgttcgggagcagctggagtcgccggacaccgcttatgtcaaaaactgtctggaacgcctgacggggcgggaaaaactgggggaacaggaagctctggaactgatggcgcaggctctggccattactattaatgcgatggtggtggggggccgctcctttgattcgggaaagtacaaggcgctgttgaaagatctcccggctcttccggatgaggctccgtgataaatctcgacaatctccggaattgattcataatcctttctttcacttgaaattttatggcaaaaaaaccattagaaacaggtgctccggaagcgtccgcagctaaaaaaacggctgctcgcaagacgacggccaaaaagacggcctctactaccaaaaaggccgccgcagctgaaaaaaaagctgctgctgacgccgcttccgtagaagcacccaaaaccaaaatcaaaacggtcaagtccgccccgaaaaccgcggtgaagacgaaaaccgcgaaaacagccaaaaaggcggctgatgaaaaggcccctgtctctgaaacggttgttgccccttccgaggccccggctccttccgctcccgtggaaaaggagatgatgcccgaagctccccagaagccccaggctgccgctccggtcaaggtcaagcgggaatcgttccgccccaatcgcaatgcggaacagcaggagcgccatgaacagcatggcggagatgtctttgcccagccggaaacggtgggcggcgcctccgaagggccctttaacaagcgcaagcgtcgccgccgcaataagaaaggcggcggttccgaagaccgcccgcccctgcaggatgccgcttctctcaagcagttggattgtaagaaggtggcttcccgagcctggaaaatgttcctggcggaagtgtctgaagaaggccttgccctgatggacgaccagacggcacgtgaggcggcccgccgcgctttccgctgtgcggaattcttcatgatggaggaagcgcgccgcaagcatgcccagaaagcagctctccagcagcaggagaaaacttcttctccggaagaggaacgggattccgaagaggattccggcgaagaataattcctgtctgtgttgatgtttttgccctgcggcggatgccgcagggcgtttttgtatcctccgggcttattttccggagtttgaatggccgtgttttatccggtgtattgggaagcagcatgcgtcaccctttgccacctgggggcaaaaagcagccttttctccaaccagggcactttttgagaatgggagagcgttggagacgcctggatgaaagcggactttatttcgtgcctttccccgttcttgttccttctaaacctttttgcctctccatttcccgctcttgaggtaccaccatgccaggatgatcagggtaacgccgtaaacgtgttcggaaaaccagcagagagccacatccggcttgaacctgatgatgccgtaataaatgacggccgtgtaaacggccagggaaatcatttccatgatgaatcccgccttggtattgcctgtgccggatacggcgttaaacaggatgaatgacggagccatgatcagtgtggaagaagccatcacatacacggaattgacactggcggcaatcagggacggactatccgtgaaggcacggaggacgaactccggaaacaggcacagtatgatgagcagggggagcaggatggcgtatgtcagtttgagagtcatgccgcaggttttgaacaggcagcgctgttctcccgctccaatctggttgctgatgagagctcctgccgtggtggcaaaagcgctgatcaccatgatcagcagggcggaaatattgcggacgatgttggtaacggccagcgggcgttcccccaaatgttcaatcgccaggaaaaaaataaaccagatggagacggaaataaaagattgcaccatggtccatccggaaatggacagcattcccttcagcagatgggggcggagtgtgaatgcccggcggaagccgtacttccgtttgtccgccgtcatgcttgtgtagatgatgaaaaagagaagggagactgcttccgatacgctggaggcaatggccgcccctgctatgcccgcggcgggaaagccgccttttccgaaaatgaggcagtaatttaacgcgacattgctcaggagcatgacaatagaattgaccgtcagaatcttcgtctgggtaatccccacgtaataggctcggaacatgacgcagaggaaagagaaaaagataccgtaggtgcgccagtgcaggtaatccgccgtggccccgtacacctgtggggattcaatgatgtcccgcaggatgatgggggaaaaatattgggatgcggcgaaaagggctaccgccaggaccagcatgaaataacagccctgaaccatggtgggggcaatcctgttgtaacggcgttccccgttgcggcgcgcaatgatgatttgtgcgccaaagccgaagccgaatgccagcatgaacatggccatgtaatacacgccgcccagagcgcatgctcccagcgccacgtcccccacgcgccccaggaagacggcatccgtcaggccgatcatatgctcaatgatcaggctgatcatgagggggtatgacatgagccatatcttttgataggaagtaaaagaaggattattcatagcaagggcagcctgcgggcatggtccgccgagggcaggcgctaaaggccaaatatttttgaattaaaatgttttcttgcaagaaagaaatgcgtttgcttccgcacatgtcatgaaaatgggggtaatgccccgggtcagctgagcggcagtctggtttccggataccgcaggggggatttggttggttgtttcatgaaggccagcacgaaagccaccatgcccacacggcccacaatcatgttgaacacgatgatccatttgcaagcatcactgagttccggagtgacgttccatgaaaagcctaccgtggcgaaagagctgactacttcgaaaaacaggcgttccagactcaactgcggttctgcaaaacacatgaccgtagtcatcatacctacccaggctccggccaggatgacggtgatgacggcccgttccaccacattgcgggcaatccggcgcttgtgcatgaccacgtctttcttgccctgtaaaatgcgcgccacctccccgcaggaaacggcaaatgcggtggtatggactcctcccgtggtggaaccgggattgcctccgatgaacatgagagctcccagaaacagggcgtatggagcgctgttgagcgccatgtccgaaatgttgaatcctgctgtgcgggccgttgcattgaacaggctctcccacaaaatccagtaccacggatcggcagacgtaaacaggctgccgtcaattattttaatcaggaacaggatcagcccgccgccaagcaccagcgcggcggtcatgcgtacgaccagccagctgtatgtggaccagtggcggctgacggtgttccgggcatcccagcccagtgcgactctggcccggcggacgatttccagatacatggcgaatcccaggctgccgcaaagcaccatgaccataatggtaatctggccgcccatattgtaggctacgcccggcgtggccaggttatccgcaaacaggctgaatcccgcattgcagaaaccggaaacggaatggaagacggcgtaccaccagagcgtgtctccctccagccccggaacatgtctccaggaaaaatagaggcctatggcgcccagcgcttccaccccgaacgtgacggcaataatattcttgatgaaccggtctacctgggcaatgccttcttcatccagcaggttgctgatggttactttggaacgcaggctcaacccctggccaaccatcagggagacgaaataagtgaacgtcatgatgccgaaagctcccacttggaaaagcaccagcaaaatggtctgtccgtaattggtgaagtgttcatgaacattcagggggaccagccccgtgacgcagacggcgctggtgctgatgaaataggcgtccgtggcggaaaggacgatgccgtccttggtagctcccggcgacatgagaagagttcctcccagcgcaatgaaggcaatcagggtaagcaggaaaagaagggcgggacgaatgcgcgggaggtggaagcccctgttccggcgggcgatgcggaaaaaatattccttgaggttcagcagaggggcggctccgtagcagaggcagagcgcgcggaaaatgttctgaagctctattttggagataaaggtggaatggaaaaagtcgcctgccagcatgaccagaatcaccagccccagccccagttctacccaccgggggttgcggatggccctggcaagccatttttcccgcaaaatgccgatgacgcccgtgagctggcccagcaccaggaaggagagaatttcgcggaaatagcgcagggaaagctggtcttcatgaatttccccgaagccgttccaccacagcagccacatcaatgcggccagtgtgcacaggccgaaccccatttccatgacctcaaaacggttcaatagcggtttttcattagtctcattcacaagcctgcaatggtgatgcctctgatgctggggggagactactgcatacggaaagatttgagaagcccttatatcgtttccaggcggccccggctggaggcaggaaggcgccttggaaaaaaattttttcatgtgaaggaaaatagttgccaatccggcgccgccgtgcataataagccccgttcttaccaaaccatgtgcgctcgtggcggaattggtagacgcgctagattcaggttctagtgggggttcccccgtgaaggttcgagtcctttcgggcgcaccaaacaaggccctgcaagttaactgcttgcagggccttactggttttatgatgtattcgtgcattggctttgacgcaacgccggaagattggtgaaggggctggataaggattattgccccgttgttaaggaacgcctgtggttttcaggggagggggcgttgcctttttgggagtggatgcctgcgaattgttcatgcgccagcttcatgaacatgcaggaggaacatttcctttcagcggtaatgcgttgcctgcgctcctggtcgtaaagtttctcgtagcgttcggcgcgtttcatttccctccagaggaagatgcccatcacggctgccacggaggcaccgttttgaacgtattcaagcaggggattgagttctgaagtcgccatgcaaacaaccgcaagggtgttggctaaaacgacacttgtagtaacggcagtctgggtcatggggctggaaaggtcatgtttcgaaacttctgcgcgcttcggaaatgcttccgaattgatggagctgcaaatgcggcggatctgtaaaggatttccatgttcctccccactccaggccgtcaatttttgcgtaaagtttgccaagagtggtgtaaagagggtgattgggcaggtagttgcggtcctggaaaattccaaaatcccaggccaggccgaagttgtgccagctctggccgccgcgggcattcgttactttagggcgttgcctgtagaggtcattctgttcggcatacgtgcgcgttccgcagataatttttgcttcatatccctggttgacggcttcattccgggccagtttgaaccactgccgggcggctttttgcgcttccggaagaagggtggagatgttccgttcggtgcgttcgtcaaagcatccgatctccattttgtaccggtcggcgtccgtgctccagcgttccgttccgttccgcgtgccgttgccgggaatgccgtcaatggctccgtgatagtacccggccaggcgcaagagcctttgccagtagaaggtatctttctgcaggtcggaaatgctgtcagccattgtcgtggttttcctgttcctttttccggtctttggtgacaatgccgatgaggcctgccgccgccatgcctgcggcgataatctggtcggcaagagcttgttcgatagtggctccgcaggctgtggccagggcaaggaggcccagccatgtggaacgttccgtcagtcgattgagaatgtatttgaacatgtgatggtcggttggtattgaaaagtccctctgtgggagaagggggaacccgcctttccggggatgccaaaggatggggaaaaggtttttccgaatcctctccgccaatggggaaagggggctatcggttctccgcacaagttgctctgaggttgctgccgcgatttgcaaagattccgcggatacttttattgcttgccctaatcggcaaaatccgtcacaggaaacgatacttgtcttttattcatgaagataccataatgcgccaaccaacgccattatgaataaccgtttaacatcgtttattatccgcagatttctaccatttctccgatatgaatatctcagggaattggaagcgtacctcagaaaagaggtaaccggttttcctactgtaattcctcctgaacctttttccgaccgccaacagctggaggcataccgcagggctctcgggcaaactattatttccggcatttgttaccggatgtacggccttaaaaaggagacggacaggatttaccgtattttccaccttttgcaaacgtgcagttccggtgaagctactgcggatttgcgggaatacgccgaatcgttgggcgtttccgtcaacagagatttttccaatggaattgaactcgccgttctgcattttctggacggcaatatcagcttgctcaggcagattgaggaattgcattccattaaaaagaggaaatcgtatcgtattcttccccccatgaaagatgcgcttcctttccccatgattacggagaaagaaagggagaaggaaaaagaaggctgccgtcaatatctgtcccgaattttgtcgcagaaggggatgactgacgtatgcgttatcagctgtgaccggatttcctctgattactggtttaccatcaaacgggggcattatcaggaaaccgttgatgaggttgacacgtcggccaaagagatagtcagcagcatacgtactcccgggaatacggacattgtcatctacagggggagttcgaaatgcctgtacatcaatttacaggtcagcgccagaatccaatggatgatgcgggcctatgccgtcattgctggccgcatgctgttcggctcggatatttgggaattaaggaaccgctacaccctgagcgtgtttaataagaagcccatcgccgatattgaggtgttcaataatattccgggtctgcgaagggttgctgtttataagcttgtcatgtccaggcctctccatgcaaggaagaggacggagaaagaggtgttgatgaggggatttacaggcacttacaaaagcctttccgagcttggcgatgaagacggccccctgattgtcgtccccagcgggttccatgtggacaaggcgtttttttattttgagtttgaagaaggagacccgaaaaccgtttctttgactcccgattccaatggcctggaattggaaagcgagcaatacaggctcattgatatgtattttgaacaggctggttttgaccagttgtacaataggattcatggagcttaattacggcaatatcctcaatatcattattgaaagtgagagcctggagtctcccgattggatatggaaggccagggtgggcggggatttttatccggggcactgggtatgcggctgtaaacttgccggaatatccggtgactattacaaccccgacgatatcggcaatcctttgaaagtggtggctctgcctccggaagaagagcctttttacgagtacggagggaaccccggggaagaagaccgcaggcgtttttatgtattgaaggaaccctgctgccgggagcctgttgagaggagcgagcttttcgtgcatgccctggtgttcaggaagattgctttgaatattgcccgttcctgcggaaagacggagagggaaatcagcggaacggagctgattccggagtgtctgatcaggctttttgattttcctgtaaccgcctattttgcttttgcttttgatgagcggctggtttccagatgcctgcgcgtcattcggcaggcacagccggaaaagccctttcttctcttggtgatggggaagcgttggcggactgccgccacggaggctgcaattgttgagaagtacaaaggcatcgttgtttccattcccgacgtcatggtgacgacgaaagatggatttgcctgggcatacggctattcctgggagtggctcaggcagggcatgcctgtgcatgcgcgcacgggggaaagtcttccaaccggcaccatgtgggaggatttgtggatttccgtgaccgatgagcgggaaatagtcttttcctgttcacggggcggtggagaagtgaaggaattcatgaggttttcctatcgggaggaaaaacgttttttcagcaggcaacgggcggcggcgggccaggattccacgaagccggcttataagatgctgtttttgtacgtaatgaatccggataaagcctgtttggacaaggaacttctaaaaagggccgggatagggaatgaggcggaagccaggtcggatttgagaaaagttcttgtggaaaggctgccccagctggcggaaagggacccgtttgccaagaaaagggagaagtcaaggcagggcatgtaccgccggttccaggtagtgccctgtaaatcttatatccgtcctttggaactgatgctttcgcttgaaaggaagccggaaaggcacaggtaggtgggcaggcggttatagaccctccccatgagcggctagctggatgagcttattcgtccggctagccgctttcttttggtaaatatatgaatttcaaataataatgatgatgtgaaagtggggcgtttttcgctagctggataagtccgcacagggttggcgaatatgcacgaaaagcaatcacaacccttgttggaaaccgtggaaaaccacgccttatatctcgctcagcgcctccgttcaaaagcaaaatccatcggatttcagatacctgaggaagagtatctggatgtccttcaacggttcaggatccgatgttgggaaatttgccgccgttaccggaaaagcggcgccgccggcatgaaaacatacctgggcaatgcaaccgtttttgagccggaacgctatttgcgcgagaggaaccggaagaagaggctgctgctgcgggaagcccgtcctcttgaatatgagaatggccgggaaattgatgctgatgagcattcggaattcctttccgggctgatgttccgggaagaattcgcgcgggaaatggaatctctggagccgctggaaagggcgctggttgaggcattgattgacactgaagggaatttgtcacgggctgccagaagcattcgtctggaggaaagcagagcgcgccgaatcaggaagcgcctccgggaggaaaaattcacttttttaagaaatggacggcgaatttccggaaacgcggcaagcaatcatagtgaaggcagatgaacgttctttcttttctggcgcatgccctgtccgggacagctccgtgaagagccgtttattcgctttatcaagaaccataagcatttgaaaaacaaaatgatgaatacaacaaaaacatgcgggaattccagttcccggcctcagcgttcggaaaattccctttcctgtcccgtggcggatgccgcggcaggcccctctcatgaacccctgcttcccgtaggcacggttgccggagatatcaggaacaacgacattgtccttccccgcctgaacattgttcaaagcgtaggcgccctttccgggatatttccccccggcagtatcatcctcaacagggaggttgttctttccgacggaagcgttcctctggagctttccgtgctttccgcacgcaagcagtttattgaaaaactcccctttgattccgtggagaagccgaccgtcttcaattctctggaagaagtaatagcctccggaggcacggtcggcagagagccgggaaaccggccttctttcgctcccgttctgcatgtgcaggcgcttttcaaggctccggagggcgtggattatccctttcccctggagtacgaaggagaggctttcgggctggctgcctggtccctgcgcggcatggcttattaccttgcggggcgcgacatcctcacggcttccagatttgccctgaggaatgaagtattcgccagcaagtggaagcttacgaccaggctcaggaggctggaacataatggcattttcattcccgcgctgcgcagtgcgggccgcagtacaccggagttctcctccttcatcaggagcattggttaaatttcttaccctccgcaacgaagagcagcgctcatgagcagtccaatcaagagattattcgtcaacgggttcccgagcctctacggaggagcgggaacggaacttcaccaccagatcattgtctggcgcaagatgggcgtggaagtccatctcatcccgtcctgggattatcacggggagcctctttacaacgaaatggtttccctgggcgtcatcatgcacgcccccgcggactggtcggccgtccaacccggcgaccccgtgctcggtttctgcaatgccggcttcctcaacgccttgccggaaatacgcaggcatacgaaacgcacagttttcatcaactgcatgacgtggcttttccccagggaaaaggaggccatgcaaaagggggaaatcgccatgttcctctatcagaatgaagccgtccgccaggaagccatgcccgtgctgcgcaagctcaacggcgacccgcaagtgcagttcctgaccttcaggccctatttccatgcggaatcctttccctttatccgggaacgcgatgaggatttcttcggctgcgggcgcatctcccgccaggatgccgacaaattcgcggccaacaccctgcatatctacggcgcatttgaatcccccgtggagaagcgcggccttttcctcggttttgacaagaggagcgaagccaagataggccggcccttcgactggattcggattgcccgcaatcaaagggaagtttcccagcaggatttttacaggcacagccggatcatcctccagccgatggatacgacggagaactggccccgcatcggctttgaggcgatggccagcggcagcgtgctcattgtggacaaccggggcgggtggcggcagatggtggagcacggcaaaacaggatggctgtgcagcaacgaaagggatttcatctactacgcttccaaaatggcctgtgaaccgaatcttcgcgacgacatggcggaggcggcccgggcgcgcggcctggagctgggcgggctggatgtttccctggagagctggaaggaagtgctggaggcgatggcaagactcccggaatgaacatggaacggaaaaccggccttatgaataaaaaatatgtttccccgtgtttcctgcccggcatgcggctgggcaacatcatgttcacgctggcggccgcctgtgcccacgcccgtaccgtaggggtggagtgtcgggtgccctgggcttacaatgacgcttccctgatgctgcgctcccggctcggcggctgggtgctcccttctacgccgtgcggcaccaatgaacctccatcctggcaggaaccttcctttgcctattgtccggttccctcccgcatccggacgggcgggcttcgcggctacttccagagcgcacggtattttgaagggcaggaagcgttcatccgggcgcttttcgcgcctctcaccgcggagaaggagcccggcgccgttggcattcacatccggcttggggactacaggcgcctccgtgacaagcaccgcattctggaccctggtttcctgcggagggcagcagggcatttatcatccgggaagaaccgtctggtgctgttcagcgatgagccggacgaggcggcggagatgcttgcgcgcgtgccagcattcggacgctttgcgctggaaatcgaccgcggcgctccgtgcgaatccctccgccgcatgacggcgatggaggaactcgtcatgtcgtgttcttccttttcctggtggggcgcgtggctgggaaatacccggaaagtcatcgttccgcgcgactggtttgtcggcggtgtggaagactaccgggatatttacctgccccattgggtaacactgtaattccgccacgaacccatacccgtaaaacaatgaatacgagaaccgttacaagcctctgggtgggaggggaacttcccctgatgtccgttctgtgcatcaaatcgttcctggaccatggccatgctttccagctttttacctaccggaattacgacaatattcccgcaggaacgcttgtgcgcgatgcgcgggatattctcccggaggaggcgattttccatgattcccacaatagcctggcgccgttttccgattggttccgcatgaaattcctttcacaggaaggcggcttctgggtggatatggacgtcatctgcctgggtgatgaacttcctgcctctcctctctggttctgcagggagtgggcggaggtggtggccgtaggcgccatggcctttcctcccggtcattccgttcccgcaaccctgtgccgccttgctgaggatccggcgctccgcgtcccctgggactctccggaagaagtccgggccaaggaggaactgctccgccgtgtgccggatgtcgccgatcgccggcgccaggtgccatggggattttgcggccccaccgggatgacgcgcgcgttgcgccactgcggcctgtttgaccgggccgctccgtcttcccacatgtatccggtcccctggacgagatggcgcgactgctacaacggcaacatacgccttgccgggccggaattgtccaatgcctggtgcgtccacctctggggagagatggccagacgggagccggacgcctgggaaaatatgagccgcaacagcatggcaggcgagctgctggacaggcatctgccgggccacgcctggaagcctgctcccgggccgcgtaaaaaagtgaatatcctggtgggcatctgcagctgcacaggcgcggcgaaccgccgcaaggcgtgccgggagacctggctttcccatcctcaggagggtgtggaatgcagatttttcctggggcggcgcactcctttgcccaatgagcccgatgtagtggccctttgggtggaggacgattacaggcacctgcccgccaaggggctcgccttttatcaatatgccctggaacattatgactttgactggcttttcaagtgcgacgacgatacctggctggcgcttgaccgcctggaaagcctctgcgacggccgctatgaccttgtgggcgacatgtccctggcggacagggggttccccagcggcggagcgggctacctgatgagccgggcgcttgtggagggcattgtggcgcacggcggccgggttcccgccgtcggggcggaggacgtcatcttcggtcggctggcgcgggaactgggcgcgcgcgtccatgccacgccgcgcctcttcctcagccatgctccggcgccccaccgcctgaatgaccaggtgagcgcccattggtgctctccgggcaggatgcacggcattgaggcccttttccatgatgagccggtggccgtttatgacgccgtgcatccccattggagggacgaactcctgttttttgcccggggccgtttcatgcgcggcgccgatggctgcaccgggcgctacgttctgcagaacgggcttctcacgctgttctgggatgactgggcgccggaagctctggaaaaaaacggcagcggattttcccgcggtccgttctccctgacccctgccgccggcagccggcagcttccttttccggagtccgtgtcctgacgggcatggcctccattccctgttcttcccatccgtccgccgtggtgcggcacggggaaggaagatgaaccaatccaatcggcgcctttcgcgccgcaataaaacaacaatcatcacacaatgtttaccaacgatcaacaaaatgacgccccctctttgaacaggggttccgcaaacatgattaactccaaccccgccgcggggcttcccgatgcggccagccagcccggcgcgccgagcgccgcagcgcccctcaatgccatgtccacacccattcagccatacggcgcggattccgttatttatgagaaatccgacaacttcgttcagacgtctgccggagccgatgtcttcatgtctccagtcaacgacacctttaccgtcccggaaggcggggccacggctgtggccagcctgacggtggatgactggggcaagctgaccatttccggcccgggcggcacgtttgagctggacctgacctccgccgccgatgaacccggaaaactgggaggccaccaggaatggtccaaatcaggctcctttgagttatccgaaggcacgtacactctctccatcacgcaccagaacatcgacatgccgcacaacgaatacaaccagtccgtgtgcagatactccgtgacggtaaccgcgcatggggactccagcagcagttcaagcagttcggacacccctccttcctccctctcgagcagctcctcttcggacgtgccgccggaggaaaaggaaatctgctgccgttgcggtacgtgcacggacgcggaaggtaatgaatacaccattgcggcggaaaaactgccgggtgaccccggcgtggaaatctgcatgtcccaggccgaattcctggccaggggaggggctccggctccgtctcccgcggccttcagcctccgctccgcggaaaacgcccgtgaagcggcggaagcctgcggcggcctgaaatacgtgagcccgtgggcctggcgcgcccatctggacgaaacgtccggcctcatcaccatggtgccgcgcacgggtgccgcgctttacttcaacgtgcaggccggttccgatacggccctccccgcgggcatctcccgcaagcgcgacttcagggtgcagctgctggatgaaactctggctcctgccgcttccggcgctcccgcctacctttccctggtggacgcggacgggcagaaaatccgcttctccgcggaaaccggcgctgtggtcggcatgacctccgcctccggcagggttcttctggcggaagactacttccggaatgtgagcaatacgtatgaccatgagggcagtctggtaagcagctacagcgccgcggaggggctgatgcgcacccggaccggagcggacggagaactcgtcatggagtggtacgctcccgccgccgtcacggtcctggccgacggaacatacgaggtaacgggggaaccttataaaacctcctccttcctgtcctcggaagaaaacggcgtgcggaccaccgtcatcacgcgccagcagcgcggactgccggcctacaccatcacccgtacggaagaacccggcagagtcagcatcgccaaaggccagggggacgacaccatcatccgcaccattgaaaccaaccgcctctacggaggcctctcggaacgcattgagaccgtcaggggcatcaacgatgccgagcctgtttcctgcagccgcagcgtcaggcaatacacggacggcggctggctgctggtaagcgaaacggaagccttcaacacgccgctggcgcggacgacctcctacgaatacaacagccagtaccgcgtctcccggatcaaccgcccggacggaggctacacgcgctatgaatacgacggcgaaggacgggtcacgcttgaggcggagccctgggccggcggcggagaacaggtaacccggaccgaatacgccggcctgcgcttctacgacaaccgtccggcgcgtgtcgccgaatcccgggtactgtccgacggcacggaaatcgaactgacggccgtcgcttacgcctatgagcagtctcccctcatggaacgggttgtcaaaaccgtgactgccgccggttccagccaggaacagacaagcgtggaagaaacgtatggagaagccgccgcctatccctatgccgccgggcaaatgaaattcacccgggacattgccggagtggaaacctcctatgactatgaggcggccgcggaatacggcgccgcgcataaaaagacggccatcaccaaagccggcggtggactggtggccggacagagccgcaagacggaatcgttcattgccgccaatgacacggtgctttttgagcaggaaagcatctgggatggtgaaaactggctgctgctctcaagcggcgcccatgaatacgatgaagaaggccgtcgcacgaaaaccacgcggggcaacggccgcgtcagcaccacgtcctggatgtgctgcggcaagctctcggaaacggacgaagatggtgtcctgacgtcgtacggttacaacagcgcccaccagctggtggaaaccatccgttcggaaatcagcgacggagacacggtcgttaccccggaaaccatcaccacctacacccgggacgccgccgggcgcgccctgcagacgcgccgggacaggggagccatgaccacgacggaaagcgtggaatacgacaggctcggccgtatcgtcaggcaaaccgatgtgctgggccgcgtgacggcgacagcctacagcgaagacggccttacggaaaccgtcacgacgccctccggcgctaccctcgtcacggaacgtcactccgacggctccgtactccatgaatacggcacgggacagcgtgaacgctgccatgtctatgacattgacaataactggttgagggaaaccgttaccctggccggccaggccatcatcctttcccggaccctggtcaacggcttcggacaaaacgtcgtgcaagtgacgcccacgactgccgggttcctgtatgaccgttccgaatacgatgaacaggggcgtctcatccgcgcatggagggatgcgggaactcaggagggggccgtcgccatggcgcctgcgctctatgaatacgatgcctttggcaacatgaccagggaaacgctcgccctggcggagcagcccgctccggacaacagccccatccgggaatatgccttcagcgtggaaaacgcggaggacggcgtctatatggtgacggcgcaaacccgctacaatgctgagggacagccgcttgtctccgtacggaagcaactgctttccgaactctccggagttctggaaacaaaagcggtcatcattgacgaacgcggcttgacttcggcggaatggacggagtatgctgaaaatacgaaaaaaatccaaaagagcgttgtcccctcttccagcgtcacggctcaaacggtggcggcggacggctttatgctctcgcagaaaaaccacgcgggtatcacggagacggccgcccgcgcctatacggccgcgggcatgaccctgaccagcacggacggccgcggcaacacaacgacgatccgaaccgacctggccggtcgggccgtcagcgtgacggacgccgccgggaatgaaaccgtgacgcaatacgacgcctgccacgacctggccgctatggtgacggacgcgctgggaaatacggtgtgcgccagatacgatgccagaggccggaaaacggccgaatgggggaccgggacgcagcccctgctcatgggttatgacgaggccgaccgcctggtgagcctgaccaccttccgcgcggcgcaggaaggagacatcgcggaggacccctccgatcgcgcggacggcgacaccaccacctggagctatgacgaagccacggggctggaaacgcgcaaaacgtatgccgacggaacgcacgtggacaaaacctgggacgccttcaacaggcttgccacggaaacaaacgcccgtggcatcgtcaagacccgcacttacgaacaggcccgcgggctgctgacgggaatcagctactcggacgccacgcccggccagagcttcgcctacgaccatttggggaatctgacgcaaatcactgatgccgccggaacgcgaacctttgcctacaatccctacggagaactggaaaccgataacctgcgagtgggcaaccacacccacctcatcaccgagaaaaaagacgccttcgggcgcagcacaggctacatctacgcgcggagcggcgcggcgcagcacaccgtaagcatcggctacggggaagacggccgcatcgccacggccgggttcctgcagggcagcgcgccccagaccttcacctggcaatacatggaaggaagcggcctgccctccgtgatggccatgcccaacggcatgacgctggaatggggctatgaggaaaagcgggatctggtcgctaccatggtctacaaacgcggcgccacaagagttgtggaaagggaatacgcttacgacagcctggcaaggcccgttacgcggcgcacggcccgccaggggaataccgtcaacgacagctttgcctgcaacagccggagcgaactgaccgccgccaccgtcagcggcaagacatacggctacagttacgacaacatcggcaaccggaaaaccgcgagggaagacacggaagaagcgaccgcctacacaaccggcccgctcaaccaatacaccgccatcgagcgcggagaagaagccgcctttgaaccggtttacgacgcggacggcaatcagacattgatcaggacatccaccggcatctggcaagtcgcctacaacgcggaaaaccgtccggtgcgcttcgtcaatgaaagcgccaaaaccgtggtggaatgcacctacgactacatgggcaggcggcacacccgcaaagtgagcgtcaacgggacggtgagcagctacctgcgctacatgtaccgtggctacctgcaaatagccgccatagatgccgtcagcggagtcttccgatggttcctgttctgggacccgacgcagcccgagactgcgcgcccgctggccatccgcaaagacggcacctggtacgcctatgggtgggatctgaccaggaacgtcacggaaatcttcgggaaagccggttacctgcggacggtctatacctacacgccttacggagaagccaccgccgaaggggacgtcacccagcccatccagtggagcagcgaatacaacgatgaagaactggggcttgtctactacaactaccggcatctcaatccgcacgacggaaggtggatcagccgcgatcccatcgaggaagaaggcggctggaatttgttcgcgtttgcaggaaattctccgtttcttcgggtagatgcgcttggcctttggaaaaaagaggcaggcagtgaaactatatggtctgcggaaaaaaatgatactttggaatcactcgcagttaatgaaggaagaaataaaggagattacgtatgtatctggcccacagaaggaaccaaggatcatggatatcccaaaaaaattaagccgtgcgataaatacgatgtaagtaatctaaggcttcctgaacaagaaaacagcgtggaattgttggttgcggatgatttatttgatagctataaagacattttccccggtatacgtaaggatatcgaaggaaaaaacgttgcaaaatttctacaaaaaatatctcaagaaggaaagaaacctattacctcttttatacttgccggtcatggaggacgcagctcgaaagatggaaatgcctttactattaattctttgtcaagattagagaaaaagccttcattcagtagagctcaacaaaaaaaggggcctgtccgctgctggttctctgtcgtagcgactgtcatgttttcaggctgcagcagcagtagctttgcaaagcaatttgcaagggaatttatgagaaaaggtactaccgttgctgggactaatcagccgataggaacttttgttcatcctgtaaaagggcctcgaatagtctatggttattctaatgatccaaaaactcaggacctaaaggaaaatgattattattcatcaaaagtgtgggaaacattcaacgggaacttgtaaaatattggcatgatgcagaatgctcttgtaacgctatttttattttctataataactctagacaaatttcatagtaagcattctatttaccaatgagtgggaacaggaaccgaagggatctgtttcaacaagataaaaaaataattccgtaaaatatgatgatatcaaaaaatgttgtttttctatgtagcgcattgctttgctcctgctcggaagatgttgatttgtatcaatccgatttaaataatcattccgttaaaacaaacaggaatggtttatataggtgcccaccggaagagttatgtaaaaaataccctcttaaaaaatattcctggaaagaaaagaaaacaatagccaagtcttttgttattgggacaacaactcaacaagaagtaatagatattttaggagttggtatagtaggaagtgataatcctcccgtcatagatagtttgggttatcgttgtaacaagagcgatccggagtatcctggtgacgaatggttaaaatttcttgaatttaactttaatgaagaggggaagcttgttaattattatgaagtaaaagtaccctatcctgttcctcattaatatttttgttatttataccatgttccttccggcataagccggaaggaacatttgttatatgaggatgagcaaacattcatcctgccttatccaccggaattttctggtgggaatcagctactcggacgccacgcccggccagagcttcgtctacgatcacctcggtcaattgacgcaaatcactgatgctgccggaacgcgaaccttcgcctacaatctctacggagaaccggaaaccgacagccttgcggcaaacggcatcgcctggcaggtctccgagcgctatgacgggttcggccgtcaggcggggtacgaattaagcgcggacggccgccgcgcccagcagacgcacctgtcctatgacgggaaaggccgcctctccaccctcacggcggaaggcatggaaacgcccttctcctggacttactccgaacatggagggcttgtggaacaactcgcctaccccaacggcatgacccgggtcaacacctatgaagacagccgcgacctcctctccgtcatcgactaccagaggcccggaagcgccaacccgccagcaaggcacgaatacgactacgacgcgctgggccgtcctgcacggcgcagggacacgtggaacacggcggcgcccaaaacgacgcgtttgttcacctacaacagccgtggcgaactggtcggagaccagctcaggcccggcggccgcttcggctatcagtacgacaacatcggcaaccggaaggaagccttcgaattcggcagcaccacggactatgaaaccgatgaactcaaccggtatgcgggcatcgtcagaaatggaggggaagcctttacaccccaatacgacgcggacggcaaccagacgctggtaaaaacatccacgggcatctgggaagtcacctacaacgcggaaaaccggcccgtgaaattcgaaagcgaagacggagggacaaccgtggaatgcgcctacgactccatgggcaggagattcgagaaaaaagtgacggttggagggacaacgggcttccacgcgcgctacctctaccgtgactacctgcaggtggcggagtgcgacttgaccggggaaacgccggtagttgtgcgcagttacatctgggacccctcggaacctgaggccacgcgcgtcctgtccatgacgcgctgggaagtagacgggacgcaggagaaagagcatctctactgcatgcacgacgcgatgaaaaacgtcacctccctcttcggggaagcgcgcggacgccgcgccctgtatgaataccggccgtacggaggtctgatcacgtcggaaggcaacatggcggaagagaacaaattccgcttctcgagcgaatacatggacgacgaacttgggctggtctatcacagtgttcatcggtatcaattcgtttgatatctttggagcggcctcattcctgttggaaatttgtcaacgggggttggaaagagataggtattcatgcagagttagttctgtaaattttgttgaggaagtcttttggaattctgtatgggattcaagctgcatccggtatgttccgggtgcagtttttgtgtaaacgggttgagaaagacttgccgttatccgccttccgggaagaacggaaagcgggagcgcagccggaagaattaattttttcttaacaagaagaagaaggaagttaactacccagaatggaatttccggatacattgaggtaatgtttttacattatattaaacatcgtcggtccgttccgggacttcgtatctgccatagcggtttttccgtgaaattttttcagataaaaaagaaaaacggcatagaataatatttttgtttccatatatgttggaatggtttgaatttaaatttcataaaatatcatgatggaatcattgttgggttttatcttttgtctattgagcggaatattctgtttttggctctttttcaaatgcgtcgactggtttgaaaaaatctaaaactgtgcctgtctatgtatacattattatttgtgattagcttaattgtgttcggttatttgatgtatgtcttgatcaaaccggaaaaattttaaccagcaagatgatgaaaacagaaattctaggtgttattgcgcaaatcgttcttatggtggctttgagctatcctctggggaaatatattgccaaggtttacaagaaagagaaaacatggcttgatttcatgaagcctgttgaaaggctgatgttccgcctgtccgggattaatccggaggaagaaatgaactggaagcagttcctgcgggctttattgaccgtaaatttgttctggttcgtatgggggatggttcttctggtcagccaggggtacctgcccctcaatccggacggcaacgtcggacagacgtgccaccaggcgttcaatacatgcatttcattcatggtgaattgcaacctccagcattacagcggggagagcggtttgacctattttacgcagttgttcgtgattatgctgttccaatttattacggcagctaccggcatggccgcaatggcagggatcatgaacgctctcagtaagaagacaactaaaacgattggaaacttctgggattacctcgtgttgagttctacccgtattttgctgcctctttctctggtggtcggattcatcctgattactcagggtacgccgatggggtttgacggtaaaatggaagtgacaacccttgagggagtggaacaaaccatttcccaagggcctgccgcggctgttgtgcccattaaacagctgggaacgaatggcggcggttatttcggcgttaattcatcccatccgctggaaaatccgacttacctttccaacatggtcgaatgctggtccatcctgattattccgatggcgatggttctggcctttggtttttatctcaagcgcaagaaactgggatacagtatttacggcgtgatgttgcttgcctttttaattggcgtttgcattaacgtgtatcaggagatgaacggcaatccccgcatagaagagatgggcatcgtccaggaaagcggggctatggaaggtaaggaaatccggctcggatccgcggctacagctttgtggagcgtcgttacgacagttacgtcaaatgggtccgtcaacgggatgcatgattccaccatgcctctttcaggcatgattcagatgttgaacatgcagattaatacgtggtttggcggcgtcggggtagggtggatgaattatttcgccttcatgattatagccgtgttcatcagcggtctgatggtgggtagaacccccgaattcctgtgcaagaaagtagaagcccgtgaaatgaaaatcgcttccattgtggcgttgctccacccgtttgtgattctcgtcggaacggctctggcttgttatctgtttgtttacgcgccgtcgtttgtggaaggcgaaggagggtgggtcaataatcccggctttcatggattgagtgaattcctttacgagtatacttcaagtgctgccaataacggttccgggtttgaagggctggccgataatacctggttctggaattactcatgcggcattgtcctcattctgagccgtttcatcccgatcatcggccaggttgccatcgccgggcttctggcgggcaagaagtatattcctgagacgtccggaacgttgaagacggattccgtaacgttcagcgccatgacttttgccgtgattttcattgttgcggctttgtccttcttccctgtccatgccttaagcaccattgccgaacatctgagtttgtaaatttagggtagaatacgtttaccaccaataacatatttacatatttccgttccagtttctggaattgaaaaagaaatctacgatatgaaaaattccaataatacttccctgttccaaagggaacaggtacgggaaagcttgaagcagtcattgatcaagcttcatccgggaatgatgatgaggaacccgatcatgtttaccgtggaaatcgccacgatgatcatgcttctggtaaccgtttattccctcttcagcgacggacaaggggatttcctttataatttcctcgttttcgtcattttgttcctcacccttctgttcgccaattttgccgaagcgattgcggaggcccggggaaaggcacaggccgacagcctgcgcaggacgcgtgaggaaacgctagccaagttgattgtcgatggcacggttaccgtcatcaatagttcccagttgaaaaaaggggattatttcgaatgtgtcgcgggagatatcattcccgccgacggggaggttgtcgaagggctggcttccattgacgaaagcgctattacgggggaatccgctccggttatccgtgagtccggcggggataagagttccgtgacgggcggcaccaaagttctgtcagaccgtatcaaggtgcttgtcaccgcgcgtcccggagagagtttccttgataagatgattgctctggttgaaggcgcttcccggcagaaaacccctaacgagatagcgttaaccattttgttggctgtctttaccctggttttccttgtcgtctgcattaccttgaagcaagcagccgattattccggaacggaaatcagcattgccgccctgatttccctgttcgtatgtctcattcctacgactatcggcggattgctttctgcgatcggcattgccggaatgaatcgtgccttgagggccaatgttattacgaagtcagggaaggctgtggagacggccggggacatcagcaccctcctgcttgataaaacgggtacgattacgattggcaatcggaaagcgacgggatttttccctgtccagggttttgacaagcaggcttttgttgaagcctgtctgatgtcttccgtttcagacgatactccggaagggaaatcgattatcgagcttggacatgaatacggcgtccatatgcgcaaccttcatacggagggggcccgcatgattcagttcacggcggagacgaagtgttcgggcattaatctgagcgatggaaccgaaatccggaaaggggcttttgacaccatccgcaagattaccgaggaagcgggaaatccatttcccaaagaagccgaggaaatcattgaaagagtggcgggcaatggcggcactcctcttgtcgtctgcatcaacaggaaggttgtcggcgttattgaattgcaggatatcatcaagccgggcatagaagagcgcttcgaacgcctgcgcaagatgggagtaaagacggtaatggtgacgggggataatccgagtacggccaggtatatcgctgaaaaagcaggcgttgatgatttcatcgcggaagccaagcccgaagataagttgagttatatcaggaaggagcaggcttccggcaaactggttgccatgatgggggacgggacgaatgacgctccggctctggcgcaggccgatgtcggcgtagccatgaacagcggaacccaggccgccaaggaggccggcaatatggttgaccttgataatgaccccaccaaattgattgaggttgtagaaataggcaagcagctgctgatgacgcgcggcacgttgacgacgttttccattgccaatgacgtcgccaagtacttcgcgattgtgcctgcgctgttcatgattgcgattccagaacttgctgcgctgaatatcatgcatctgcatagtccggaaagtgccatcctgtctgcgattattttcaatgcaatcattatccccatcctgattcctctggccttgaggggcgtggcgtacaagcccattggagccagcgctctgctgcttcgcaacatcctgatttacggagtgggcggtctgattgctcccttcatcggaatcaaactgattgatatggctgtcggcctgtttttttaactgaaataaatatattgttatgagaaatttagtgaaatcattgcgtcttacacttgtcttttgcgtctttttctccatatgctacatcctagtgctgtggatattcggattgattgccggccctggcggaggaaatgcggaaaccctggttttgaacgggcgcgtggtaggcgctgccaatgtcgggcagcaattcacgaaggatatttatttctggggccgtccgtcccatgcgggcgacggttatgacgcgtccagttcatccggcagcaataaggggccgaccaacgaagaatacctggccgacgtgaatattcggatagattcgttcttgaagaaacatccttatttggaacggaaggatgtcccttccgaaatggttacggccagcgcttccggcctggatccgcatatcactccggagagcgcctatgtgcaggtgaagcgcgttgccaaggcccgcggcatggaggagggggcggtgaggtctcttgtcgatcaggccgtggaaaaaccgctgctgggcatgtttggcacggagaaggtcaatgtgcttaagttgaatattgctcttgagaaggctgatccttcagggaagcattaatttcctgattgtttagggcggcaatggcgattccggatttggtgataaattgccgccttgaaaaaatgaaatcaattgcgggcttcatgtcatggtaacgcccgcaattgattttcattttcaaaagattctgtaaaatcaacaagatgtttttaaccgcaggagccgggtgaatttaatatgattgacggaagtaacggagcagagcactttcttgacctgatacggcgttctcgaaggggaaagttcaagatttacattggtatgatggccggagtaggcaagacgtaccgcatgctgcaggaagcccatgaattgctgaataacggcattgatgtcagaatcggttacgttgaaacccacgggcggcccgggactgaagccatgctccggggggtgcccgtcatcccgcgtaaagtggttttttacaaaggcagggagattgaagaaatggacctggacgcgattcttcaagcccggcccgagttggttattgttgacgaactggctcataccaatgtggaagggagccgccatcgcaagagatgggaagacgtgatggagctgcttgacgccaatattaatgtgatttccgcgattaatatccagcacatcgaaagcctgagcggcgaagtgaaggagattacggggattgagatgaaggaacgggttcccgacaggattttgcaggaggcggacgaagtggtgaatatcgacctgacgtccgaggaattgatcggccgcctcaaggcaagcaagatttaccggcctgaaaaaatccagattgccctggataattttttcagaacggaaaatattcttcagctgcgtgaactggcattgaaggaagttgctttccgagtggagaaaaaagtggaaacggaagtattcccggcagtttcttccgccagaagggaaaagattctggcctgcatcagcagcaatgaacagacgccccggcgcatcatccgaaaagcataccggatttcctcgcgttacagtacgtcgtttatcgccctttacgtccagacgccaagggagtcccccgaccgcatcaatctggcgtcccagcgccatttgcttaatcatttcaagctggtggccgaactgggagggacggtgaagcaggtgagtgcggaagacataccccaggcgatcatcgcaacgtgcagggaatatcatattacggctatttgcatggggcatcccgcattcaaaatgcccggagccatgttcaagatactgggatataaacaatttctgcgtgtcttgtcggagatgaagatagatttaatcatcattgcataaaaaacagaggtaaatttgaaaataaggccggagctagctcttttcacaggaagcaggcgatgagattatcatgcttgtcttccctgagcggaacggattgttgcaagcagtttccattatagcctccccgggggcgttttccgttaccattcccgggcggtgcggccccttttattttttccgtctggttgtctgaaaaacagtccaatgttccggtccgccgcatctccggcagcacctttgttgaaaaagaatgtagaattcccggaggagcagcattcttaaaagtgaaacgataacgttccgtcttccatagaggagcggcggttatcataaacagaaggaacagttatgagcatcaatttgcaaaaagtcattatcgccgtatgtgcggccgcaacggtcagtgcgggattcgcagcccgcaccgagggggccaaactgcaccgattcagcactactatcgaaaaagagaggccgcagttgaatgaagaaacgaaacggttgattgcttcctatcgccggaatccgtccgaggctaatcggtcggctttgaggaaacaggtcgggattaattacgacaaggtccttgaccgaaaaaaggcgaagcttgaagaattgaaacgaacggcccggcatgcgtccaagatacaggaaatgcaggagatcgtggatgaaatggttcaaaacagggaagcgcgcatcgaccaaagcatgcggcgtttcagtgatccgcgattcagaccaggtgcccgctatgcagatggcgggtatttgccggtgctcggagcttcctggaatgtatcaattgcatatactccggttaccaatgaggattatgcccaattcctgaaggcaacgggaaggaaggctcctaaggattgggataatggcgtcatgcctgcaagcaaagggaggcatcccgtggtgaatgtttcctatgacgacgcttctgcctattgccaatggttgtcgctctgggatgggaaagccgtttaccgcctgccgactgaagaggagtgggagtttgccgccgggcatatgcccaaggatgcggattttaattgcggcgagagaaacgggacatctcccgtggacgcccatgccgcgacatccggcgcctgcggagcgattgatatgtggggcaattgctgggaatggacttcttcttcagttgaagtttccaaggccgtggcacacggtaaaacggtcatggcggtgaagggcggttcctggcgttcgccgcggacgagctgccgaactgagcggaaaggagaaggaagggaatcttctttcgttttcagtgatgtcggtttccgggtcgtccgcgaaggttgagggggattccatgcgtttcagtttcttacaggcaatagaatctggctggcaaacctgatggaaattccggccgaattggtagatttccctagggaactgcattcttgaaaagtgaaacgataccgtttcagaaaaaatatcaaccctcattgattatcatgaacaagctcatcattcctgcaattattggaatattcggtctggctcccggtacggttattgccaacgcggcggaatcaacaacagcctccttttctgttcaaatactgaaaaagaaaccgaaggcgttgaagtacggcctgaaacacggcctcaagaaaggtttgaaacacggtctgaaaaaaggcaggataaacggcggtaaaaaatagtcgccgccatcttatctgttgccgggcctgcagcccggcagcgttttcccatcaatgaggacgttttatcacctgtagggcggaaacatatctgacttccgtacagctttgatacattgcccatcatgtcttaaaaagtcaacatattgagaagaaaggcgttttatggtaaaatggttgttgtgcggagccgccatgatttccggcatcgtgatcgcggctgagctggaaaatcgttcattccagtttggaaattttgaggtgattgctgttcaggatgctctttcagcgatgcggttcgaattattcccgggtatgccggaagaggagttcctccgcttaaccggaggcgggagggttccttcttccgtgaatgttttcctgttgaaacgcggcgacggaaaaatcattctggtggacgcagggaacggaggaaaacggggcgggatgctctgtaaacttgaacagagcggcgtttttccggagagcgtcgatttcattttgctcacccatatgcacggcgaccacatcgggggattgcttgggaaacatggcgaagccgttttttccagagccctcgtctatgtttccatgccggaatgggaattttggcaaaatggtacggacggactacagggaaaacaggtccggaaggtgttgcatgcttacggcagccgggtgagaacattccggtttggagaagaagttctgcccggcatcaaggctcttgacgcttccgggcatacacccggacataccgtttttgagactgattccctgctgattgtcggagatttgcttcatgctgccgcgctccagattccgcgtccggaggtttgcacgatttacgatatgaatccgtccggagcggttcaggcccggcggcgcttttatgagtttgcggcttcttccccgaagccggtcgccggaatgcacctgccgtatcccggaatcggccggataggaaggagtgcggcgggatatgtctatctgcccggaaaatgagaaaggataaaaaagacacggtacaatgacgcaagcagaaacagcatgcccggatgtctggggaagccatttccttgaataccggggaaggcttcttgccctggcccggaggaatttgaatccggttcttgcccggcgcgtttcggcggaagatgtggttcaggaggctctgctggcagcctgcgggaaaatggctttttttgaaaacaatccggagattcctgtctatttcaaactgcggatgattctgttccagacccttacggctatggaaaggaagcatctgcaatgcctcaagagagacgcctgcagggaagtgaatgtgacggatgacagcgtggggtccgctgcccggttggattggaaccggtttgcagatactgtgaccgggcctcttacccgtgccgtcagggcggatcgttatacattgctccggaaagcggtcgaggcgctgcccgaaaacgatcggcagattcttgaactccgccattttgacgacatgtccaatgcggattgtgccgaagtcctgcatattgggccgaaagccgcaagcatccgctatgtgcgggcgctgcagcggcttcggaagcagctgatggagttaaccgagtttcagccatgaaggggaagatttctctggaagatctggttgaacaattcctggatcagtgccgttccggcaatgttcccgatattcaggattttgccggggcgcatccggagtttgcttccgagttgctggctcttcttccgcttgtgatggagatggaagattggagcgttgaaaaaaaacagggaattatgcctccggttcacgattttcccgatttggagggggacgattaccggctgattcggagactaggcagcggcggtatggggatggtatttgaagcgctgcaattgtccctcaaccggaaagtggccctcaagctgttgtctccgttgctgctgcaggatgccgcccaacgcagcctgtttgagcatgaggcgcatgtgattgccaggcttcatcatcccaatattgtcagaattttcagtgccgcgtgccgtccgggatgttgttattatgcgatggagttgatagaaggcaagagtctggacggatgtgaattcagtaatccgtatgagatagctcgtattggcctccaggccgccagggcgattgcgtacgcccaccgctgcggcattctgcaccgcgatatcaaaccggcgaacctgttgctggatgaagcgggggaagtacacgtcagcgattttggacttgcttttctgcttcaggagagaaatgaagttattgagaaggaaggagctcagagcggaacgctgcggtatatgtccccggagcggctggtgcatggagtcaataccttttccagcgatcagtatgcgtttggggtgacgctttatgagcttgttgcaaaatccccaccgtttccggggatagctcctgaagaattgatggaacggatttgcagggaaccggttccgctgttgaagtgcatcgagcccgacttggccgcgattattaacaagtgcgtcagtttccgtccggagtcgcgctatcgaagcatggacgaactttctgaagatttgctgcattttttgaatcatgaaccggtcggggcctcctccccgtctccgtccagacggttgcagctgtggatgaaacgtaaaccggctgttgccgtattgtctttggctgcggccctgtgtgcggccgctttcgttgtcgcgttggccgccggttatctgcagacggcgtctgcgctgaaactggcggaaaacaatgccgcagttgccgatgcggctttgtcacaagtgttcacccgtattgcggagcagcccccttcacagaaaaatacgcagctgctttcagctttgctgccctattacaggatgatcgccagaggaaaaaatctgccggagtcaaaggtttgcgaggccaatgccgtcatcggggaatgcgcactgcgcaccgggagttatgctcttgcggaagaagcgttccgcaacatgatgaaattcaggaaagacgcttttcccatcaaccagttggcgacggctttgaaaaaacagggtaaagataaagaggcaacggaacttttccggcaggtggccgaccgctttgcgatgtcggagcgggcggaggatcggtttgaaacggtccgcgcgttgctggctttgtccggttctccggagagtgttgagcgttcccgggcgttcggaatgttggaaacattgttggaggatgatcctgaccatcctgaataccgttttcaatacgcacagcttttggccggaaatccccgccttttccgggagagacgcattcccggcattgaaccgaatgcagccgtgctgctcctccagcttgccgacgcccatccggaacggccggaatacggcctggcgctggtagagctgatgctgaagaaactccggtatgccaggaatttccgggaacataaccagagggaacttgccgatacggtgaatctttccgaaaggcttctcgggcgttggccgaatgatccgcaggttatttccggcatgatccggctgcatgcacggtatattggggccctgcgacgcgaaggaaaaaatgcctgggcccgaagggaaagcgaccgcctgcagggcatcctggaagttcttttttacaatcccgagatttccgatgccgtgaaagaaagcctgatccgcctccagcttcaacgtttgaaactgttacggcatgacggccggagttatgaaggagcggagctgcggaaaaaaatcagccgggagctgggcttttaccacggaccgatgctccgggtgttccgggatgagttggagaaagccgggccggatgatgaatcctccgtcgggaagagtgaagattccattatttttgaacgcaccaagcaaggtttgtaaattgtccgcttaccggcactcagcaatttgttgtgtgagggggaaaggaaagcgtcccgttctgagcggcactgttgcagaagaaggcgggtatttgcctccgttgcaggcggagtgtcagatgcgtttctgatgcatctttgttttccgagccagctttttgttccaaggcgcttcctgagataaattgctgtattcccttgttgacttccagttggtggaacccatatgctcggatgatatatcaaaatttcaaccatcaacgtttaatgagcatgtataaacactattctgacggccgccgccgctttctcaaaatgtccgccttgttcggtacggctgcgctgatttctccggccattgcccgggcagagggcgggggtgccgattctccggaaaacggcggctttgccgcctcccggagccggacgcttggcaagggctcctgtgccttggaagcttctccccttggcttcggagtcatgggaatgacctacaaccgcagccagtctccctcgcgtgagcagtgcatccggcttcttcatgaggccgtggagcgcggagttactctttttgatacggccatcatctacggccccctgagcaatgaacttctggccggggaagctctttcccccttcagggggaagatcagcgtcactaccaagttcgggcacgaagttattaacggaaaggggacgggccgccaggacagccgcccggaaaccatccggcgctactgcgacgagtcgctgcgccgtttgaaggtggacgctattgaattattctaccagcaccgctttgatcccagggttcccgttgaagatgtagcgggaaccatctccgaactggtcaaggaaggcaaggtgcggcgctggggcatgtgcgaagtcactcccggtacaattcgcagggcccacgccgtccatcccctgacagccattcagagtgagtaccatctcatgcaccgggatgttgaaaacaatggcgttctggatgtctgccgtgaactgggtataggctttgtcccctacagcccgctcaacaggggattcctggggggctgcatcaatgaatacacgcaatttgacccgaacaacgacaaccgccagaccctgccgcgtttcacgccggaggccatgagagccaatatgcgtattgtcaatattctgcaacagtttgggaggacgcgcggcatgacttcctcccaggttgccctgggatggctgctgcaaaaggctccttatatcgtacccattcccggcaccactaaactgtcccatctggaagaaaacctgcacacgcttgattttacctgctctccgcaggagtgggcggaactggagaacgccgtagccgccacacccgtgaccggagcacgctacaacgcggaacagcaaaggcaagtagggcattgacccgatttgtttgccgggatcaacggcaatcgcaacggcggcctccgcagaacgttcgtcaggcgttccatactatccggaattccttgttgattccgtttttacggattgtctgaaaaacatttccttctgaaagcattctgccggaagaaggggatgtgttgttgcgtgaagcgagtagcctccatttgcccctcccggcagcaggcccaggcgtcagcaccttcttcaaattttttgtttcaggaaggaatccatccattccgggttcacctgtggcagaggttcgcctttgtcatatgcctcgcagcactggccgatatactccattttgattttggagtatttcaggcattttttcagttcccgaatgcgcgttttcatggcctgatgcccttccttcaacatgcggtaacgttcgcgcaatgtcgaattaccttggcgaaccaggtgaaaaaagcgtttgatctccttgagttccaatccagaatgcttaaggcaaaccagccccagaagttcttccatttccttgcggtggaagatacggcatcccgccccgtttctcgggatgtccaggattccttcttcttcaaaaaaacgcagattggacggcgtgatgcctgttaattccgagacttccgaaatggaaaggcacatgtctttctgttctccaagttctgatgcgtcttgcatgaagacactatggctttttcttaggctgcgggaaacgacaatttccgtgtatgggcggggaagccggttattattgcctttttaaggtacatggcattcattttctcaaactgcatgcggccttccgttttgtctggagtttccagcagcgctgttccggttccggtgtatttctcatattcctttacatcaaaggttccgggggatatggtccccgcgtttttcagcaaggcaatgattcttttcaactgtgattacagtgaaggcgcccatgcggatattctccgcagaatggcggaaacgaatatggagcagactgccggttacggggaggacccctattgcgaccaggcccggaagctgattgcaagcttgtgcggcagaacggatctggatatccatttccttatcggcgggacccagaccaatttcacggtaattgcggcggcgctgcgtccccatcaatgcgtgctgtgcgcggacacaggccatatcaatgtgcacgagtcgggagccgttgaggcttgcggacacaaggtttccgctattccttccccggacgggaagctgacggcccggcaaattgaggaggcgtggcacgcccactgggatgacgagacccgtgagcatatgcctcagccccggatggtttatatttcccagccgaccgaattgggcaccatttattccagaaaggaacttcaggaaatttccggagtctgccgccggcgggggctgtatttgtatatggacggagcacgcctcggctacggcttgtgcgatgaggacaatgacctggatttgccggcgattgcctccctttgcgatgctttttacatcggcggcacgaaggtaggcgctctgtttggtgaagccctggttctgcggcatgaggccctgaaggaggatttccgttacatcgccaagcagaagggcggccgtcttgcgaaagggcggcttctgggcattcagttcctggagctgttccgcgacggcctttatttccggctgggcgcccatgcggaccacctggctgtgatgctgcgggatttttgccgttccagagggctggcgcttcccttttccagcggaacgaaccaacagtttgtcacgatgcccgattccgttctggaggagctggggaggaaatacggttttgcctatctgcgccgggaggatgaaacccacagcacggtgcgcttctgcacgagctgggccacccgagaggaagacgtacgggaattgatggcggatatcgcccgcctgtgctgaaatttccctccgtccggcaatgccgggaaactgtggaaagggccgttcccccattcgtttacggaaaagcatttttgtctttccgggaggaacctgttgagccatgatatggttatgcccttaatcgtgggacaggaatggcggaggagaatttcccgcatgcagtggctgctgaatgccgtgctggcggtggagtgccttagcatgcctttttttgccgccggggcggtagctggtatggtctggtacggcggacgcaggatgggggctgactggggctggctggcgggaggcgcccttgccgccgcaggtttatttttggcggtgtgggggtggctgcggctccggggccgttttttcagcaggcgtgatacggcggcctttctggatgaacagctggggttgcatgcggcgttgagcgccggtgaggaatggggcaatgccgtggaggtaggggaaagcgcggtacaggggaattccgtgctgcggatacgttccgcctggtgcctggcctggctggcgggaggcgcggttcttatggcttgcggggcttttttgccgttgcccgcgccgcaagccgtagggcagcttccggatttgccgcccgttctggcccgggtgggggaagtcctggaccgcctggcggagatggagagcgtggataataagagcctggagcctttccgggagcagtgggaggatttgaaaagaatgcaccggaatgagatgtattcccatgccggactggaagcggcggatgccctgaaggggaaaacggcggcggccgttgccggattatccaatcagatgtatcggacggattccgccctttccctgctggacagcctgaatggagcgtccagcccggaggcgatgcagtcccttcaggaggcgttgacgggaatggagtcccttgccctgcagccgggcggcatcatgagccgccagctccaggagctgaaggcttccctgccttcccggcagattgatccggagacggccctccgtctgcgggaacagctggaacgggccgcccagcagctgcggagcatgtgcgggcagtgcggcatatccctgatggcgtctccggatgaccgtaccgtgatggaagccgggcagggagagggaagtgaacccggacgaggaggaacggggcgtggacgcggggacgctccccttgcctttgagatggaagagcgcccccggcttgacacggtttccagacgggcggttcatgaggacttgagccgcgccgctctgggggaagctgtgggggtggagtcggcggctcccaccccggaaggggcaggaaatgggctggaacacagcggccggggggctcgtccggcccgcggtggagatgccgtgtggtctgattgccttactcctcaggaacagtcagccctgaaggaaattttcagatagattgattgttttctcttgaaggccgggagcgcgtaaccctctgccgcggttgtccccggggaagcaggccggtcctggtaaacagagcgtccagaacaaggaggacgcaggcgctccacagcaggatgggacggagttggaggcttgttccgggcctcggttcccggaaaatggagggaaggtccatcctttccctgcctccggtccggttcaccaggtccaggaaagcgttgccggattcaggcggcatggcccattccgggtccacctgctggctgacagggccgaaggggataacgctgccgccgatgcggaccgcgccccgcgccatgactccgtgcgggaggggaaagctgcactggaatattcccggctgcaggtgttcccagatgccgttttgtgtacgggagctttcttttccggagagttccagggatatttccggcatgcgttccgccaggcgcgggatgttttcctcactgtagtaaaggcgaatccgtaactggtctcctgccgtgtccgcccgcacggagtatccctgtggggaatttttcctgttgagccaccgggccagggtttggataaggtctccgtagccatcccattgctggatgttttttccgagttctccccccatggcgaacgtaacggcggccgtccgtcccgtccccctgttccagaaggagaccaggggcgccgcgtttccgtcttccgttacgcaggctgctgttgctccattccttaaataacacaggttataaccgtctacggcagggggccattccggctggccggctgcaatttgaagccagccagccgtgccgcgcaggagggtgcgttccctgatgaaggcggcccgggccacactgacggtttcctgtgcaaagatgctggggatatcccccgggcggtcgcagaagaagatgcgcccccgtcccaattccgctatttccctgagaagtccggcatcggcgcttttttccgttcccagcgcgatgacgcttacggtagccccttccttaaccatttctttcagagttacccggtagtcggcaggttcttcggaatcgtcggcatctgcaaagaggagcagatgccgtgttccggccacggaacgttgcagttcctgccagcccgctttcagcccggcgccgatgaagattcctccgcccatggaggcaatcctggagacgctggatatcattttcttccggttagggcccagactgcttagcgtgacaatagggtgcggttcgctgtccacggcgtggacggagatgagatcctggtcggacaacagggaaatggtctggcaggttccggcattggccagatccattttcgtctttcctccgggaacggaacaggacatggatccggaacggtccagaacgatgctcatggccgtcatgagcttcatcttgtccttcttcatttccatggaaacggggagcagttcgtcaatgggggaggagaagtagccgccggagccgaaactatgcctgcccccgcacatgagcaggccgccgccctgttcccttacgtaatagtccagggcatgcagaaagtccggcgggacggaggatgcggagaggttgttgatgatgaccagccccacgccggagaggtggcgggcatcaagccggttcaggccggacggttgttggacgcggaatccctgcgcttccaggaaaggcgccagggggtcgcggtcgtagccggagagcagcaggacgccgtttcctcccgtcacttcaaggaagctgacggcacggttgttttcagggattggatcgttttgcggcgttatggtcatttcataagcggaacagccgggtgtggagagcctgtccgccagcctcaccgtggctttgccgttgagcagggtagccgtcccccgcagcggagcccctccgtttttgctgatttgccacggaacggtgatggccgggccgggagggcctgccagggttgcctctaaaataaaggcttcgccgggccggatgcgcgccggctgttcggatttgttctatgcggatgtccgcttcccggaaggtgacggacaggcggtagtccaccggaatccgggactggatgagctgttccgccgcctggtccagcggcgtggtgggccagccgtccgtcaacatcaggatgcggttcgtccggttcggggacatcagggccatggtataggccagggcctgttccatgtccgttccggcggttcccccggcaaagacggggtctccgcgtccccggagcacggcggattgcgcgaaatccaccaatcggacgcggtccccggcatgtttgtgccgttccagaatagcctggatttcctctgcccctgctgccggaattcccgccgtggaatttgattggtccaccagcacccacaagtccatgtctttgccgcccctgtcaagggcaggctgagccagggccagcagcaggcagccctgcagaaggaggcgcaggggggaggccaggcgcagacacctgtatttccagcctgccgccagaagcagggggatcaggaagaaccattccggggtgttgaattgaatcatgggcgcagggagatgtctgggacgggaggaagccaggaaagaatcagggccaggaacgccagcgccagccagagggaggccagagggtcacgtttcatgtgccggagcgcctcttcatggggttggggaagtcctgtgtcaaacgtggagcagtgggaaaaatctcccatccgggcgtcggagaaccagacggagccttggaacaggggcgttttcccttctccgggggggaagatttccacatatccggtttcttccgggagcctgccgttaaagacagtttcacggcgttctcccccgggcatggtttgaatgagttttccgcctgcgggcatggataagagagttcctccgggaaggttgccgtaatgtgttccgggcagattctcctgtacggattgcatgaatctgcgggtcatgagcaggggcgccggaacgcggtccgcattggatttttcccagggccagttgaggaaaaggcgtttcccgtccacccaggccaggggggattccccctgccagagcaggactccggctttttcccccggcttcatggaaccgatggaggggatgagcaggccgctccagttcagcccgtcagtcagcggatgccgttccgccgtgacagcgccgtaagatggtttgccgctggctgcaaatatgatggccgcttttccggggggactggcgttttccgtttttccctccagcaggaggaggtcgggatctgagccgtccgggacgggggagaatcccggcaggctattgatgatattgcggaagatttttccggattgttccggaatttccatgctgacggcaacgggggcgggagcggagcggaccagcaggagctcattgtccgccgggaaggcgtccgtcgggagccggagcacggcctttccgctttcaggagggaggctgtattcaggttccgtgacagttcctggattcaggaacagggaacgtcgggcaggaggacgcccgccttccgtatggatggagatttcgctccgaagaggggatgggctattgtttttaacggcaatcctccaatggccggggccggcggcctccaccggggttattcccgcaaaccccgcattttccagaggtttccctacaccccgtgcggattgcccggcgggaaccctccgggcagtggatgtaatcaggcgcgtgattcctgttggtccggcaacggctgtggcggtgcgcagggcaggggccaggtcatgtgttccttcgcgcggctgccagagatccagggcgcgcagggcctggcggacggacggcccccggtagagaggctgtccggaagccctactgcccatgagaacccatgtgaccgggattccgcaccggaggatggtgtccatgtcttcggagacggcattcacggcttcttgacgaaagggggccatatttgcggaatcatccagaatgaagactacggtctggccggagcctttgccgggccagacaggagcggccagaacccaggtaagcaggaggacggccagaatttgcatccagaaggagcgtgatatgcgcaacctgtcccaggcattaccctcatgggcctccggagccagagcttccaacaggaagagcgtggccgtggcctgtgtttttgttttgtgctggaggaaatggatggcggtgatgagggggatggccagaagcgcccaaaacgcggtcgtgttggtgaagtgggggatcatggcttggggggagagtaaagggtgcgggggcggttcaggagagttccacggcaccctgccgtaatgcttctccggaaagggcttccgtcagcgtccccttgcaggggatgcgggcaagaacggcctggcggcgcaggcaggcagaaatccagagttcaaaatgggcggcgtaggcgcgggcgtacctccgggacagggaaggggtgatgagctggcggcgcaggtggccggattcacagtttttgagtctggcgttgctagcggggatttccgcttcttcctgcagcgtgggggccaggatgacggacatcccttttaaggaggccatggtttccagaaggttgtccggttcccccgggtagagaaggtcggagatgaagattttcattccattggggcgccagatggaaatggagggcatggattcatccgggggaaggctctggatctgcgcttcccattggccggagagaacatcttcctggtccagggggatgatacggcgccctttcaccgcatgaatcttcacctgggctcccgttccgatggcggagagcaggcaaaattgaagcaggccccgcgtgcgtgccgcgcgctcttcgtgaaaaaacatggattcggaaacatctaccgccacgtctacctgcggtgacagttccgcccggaagactttcatggtgagctggccggttctggcgtacgccgcccaatggatatcccgcgggtcatccccccactggtaggagcggcttccctggaagtcgatggagttgcctgctcccgttccctcccaatggccctgtgttcctttccaggcgcagcaggaaaagggcagccggagacggcgcgccgcctgttcggcgtccggctggatcacctggctggggaaggggaaagaggtcatggggatggggggaggcaaaacggcgggcaagaactattcccgttcccggcgggaatttcccggtttctggagaggttcgggggatgcgttccggaatatgtcaaaccagtgtttgctggtgagagccagcaccgctattccggcagccaggtccatcaggctgaacagggaaaatttgctgaaagccagcaatgtttcttgtctcaaaagttcagataaataccctccggggagaagggggacggacagattcacgccccacagcacgttttgcaccaggcataggatgaggcagatcatggtgtatgtcagcaaggtattgtttttcagtttttcccagaacagtttcagaagcatggccggcatggtgatggcgtaccagccgcctgctgcgaggcaaaagagccgttgaggggactggaattcggggacggatgccatgcggtctatcagatacacggcgatagccgccagggcgcagagcaacagggtgaacaggacgctccccggcatgccggggaggaacagcagctgttggagcctggagaatcttttgtttttcatttgctccatgtggatgggaaggaggcgggcaggcgtgttcaggttgataatcatcaggaaaattccgtaaaccatgacaaaaatggaatttccggtcatgatgttttgaatggagccgcttgcgttttccagaaaggggagggggaggatggaggctgcgaaaaaagccagcagaagcttccgcaggggggcagccgtgttttgtgcggcaggggagaaccattcccttgccagcagaagcagggatgagatgatcaggaaggcgtccgccaggacgaggaatatcaggagaacgccttctcccgctccatcccggaaaaaatccagctccgcatggttgcctcccagggtcaatataccgattcccatgagggagaaagcgatgatgcgcatcagagagggcatggcggacgcccacagggtatatgcggtcagcatgccggaacccaggtaaaggaggaaaaacagggttacatcctgtaccaggtcaatttccccgtagtaataccggatgagaaagaagggcagggagataaaggcaatcagcagggattgggccatgaaggatatccattttcccagcacgatgcggcctgcgctctgcctggtgagcagcagcagttcgttgtttcgggtgagcagttcgttcctgatggaggtggaggccctcagcggcatgatgaagagtagggcgacgaccatggtaacccagaagatgatctggcatccgtcggggctgacgaagggctccccgtcaagaggattgatgatgaagctgaacaggaagaaaaaggagagcagggagggcactatgctgaccaggaggatgaatgacggcgttctgagaccctgacgcaattccttgaccagagcggagggcatccatatggggaaatcaagagagcgggtggtattcatgaggcggggatggatggggtttcctgggaagaggcgggattctgccgcggggccggttccccgctgccgtggataaggatgtccacaaaagcttcttccagacggcgttcgctgcggtggaaatcaattacggggaggtcgaggcagagctggcggagttccgcagccacagcttccggttcgcaggagacgaaggcggccactactttctgttgctgtacatggcgcactttccatccccggcggagggccagccattcctccagtgaggcggtgtcgtctccggcggtgcggatttcaaaggcgtatccggattccgtctggcggtgcagcaggtcttccatattgccgtcatggatgacggttcctgcattcatgaagatgagggcgtcgcacatttcccccagttccgagagaatatgggagctgatgagcagcgtttttccgcgcgctttgagcagatgcaccagatttttgaattcaaggcgcgctttggggtccaatcctgccgccggttcgtccagaatgaggaattgcgcgtcgctgatcagcgtacgcgccaggcagagccgctgcgtctgcccttttgaaagtttatcgatcatctggttctggaggccggccagttccgtgaagtccatcacttcgtccacggcgtccagtaaacgttccctgcccatgccgcaggccctggcgaaaaaatccagatattcccggacgctggtgtttttataggggtggaaatagtccggcatccatccgatgcgggaacgtgccagttcgggatgatccacaacatcggccccgttgagcctgatgtggccggagtcaggcatttccagcgtggccagcatgcgcatgagggtggttttgcttactccgttggagccaatcaggccgacgacctggccctggcggatgacgaaggaggcattgttgacggctttcagcggaccgaatgatttggacagtccggaaacttccagcagtaggggcgtactcatggttattcgtgcggcaggggagtgacggggccggagacggtgacggaggttttttcccagttaatggaaggcagggtggggatggggcccagttccccgcccgccggttccatggatgcccggaagtgcagcgggggagggccgtccggttcttcttccggcaggaacggggatgcctgcattttacggccgggaggcagttgttcaagaatccagtattttccggaggcgtcccggtaggtgagtccgttcagggttccgggaaaggtgctttggaatacgggcgccccgccggggcgcgtctccagcagagtgagcgccgcccgtgtggaaaccggcatgatgattcggtgctggagcgtggagcggctggtgaaccattttcccccgcattcttccccttgccgcgccgcgccttctatgggtttttccttaatggagccgcgcgccttgctcatgcgtgctccggtgatgccggcgttttccggcaattgaaatgtattgttcagcaggacggaggtcttgcaaatctggttttgggagatcagggcggagtggtcctgcggattaacctggataagaatttcccggctgcccgtccctcccgtgccgtctccggccagaatcaggagcagcagaagaagggaaaatcccacggaaatggccgggatcagcaggaacagcctttgccttttgcctgcgggagcccacaggaacaggctcagcgggccgacaagcacggcaaagatgatcagccccagccccagcgtggtggatggggctgagaaataatagggagcggcggaggtaatctccgggtaacagtttcccttttcgtggaggttgatgaattcctccagtttcagctttttttcttcttccggcaggccgtccagggacggaacgtgcagaatgcgcccgtttcccagcaaccgggtggaaacggaaagccccctgtcaccgatgagccacaggtttccccctcccgtcacccattggcggatggctttgcggtgggcttcgtcaaaatgggtacggtaggttttttccgggatgatgaggcaggtctgcccctcgtacatccggtagtcggctggccatttcatcaggtcgcaggaggaaacggccgtgttataggaagattcggaaagcaggtgccagtccgccggagcgccttcctggataaccgcgaccattttcctgtgctccgtatccgtgggaatgggggaagctccttcgtggttttccttcacttcgtagacgagattgtaggagaggagagggtaaacgactgcatgaacgctttcccgggccggaatgaagaacggataagtatggctggttctcctgtttccgttccacccttcatggaattgaagagtggcttttttgtccgagccggtggtgttttccagcttcacccggagagggacgcgggcgccgttcgcgctgtagtcaaatgctttctccacggaaacggcgatggggggagcggcggccggttttgcgtggagcgggagaatattgaatgccgaaagaaggaagaggctgaagaacagccatgaacgggagagagggcggcgcatgggggaagggctgaggaggtgtggtcaatgaatttttgcggcggccagggaatccggcaggggcttgttctgggcagggatttccctgaccaggcggttgatgactgcggcgggtgtctgtccgtccagacgggccgtgtggttgagcaggatgcggtgctccagcacgggatgaataacggcctgcacatcctcaaaggagcagaaagcgcgcccgtggcgcaaagctcgggctttggcggcagccgccaggcctagggccgcccgggggctggccccgtatttaacgcctccggaggcttccgattctccgggatgcgtagcgttgactagcctgcctatatagtccgccaccacttcgggaatggctacattccgggccatttgcatgagttcctgcaattcctgcgcgttcaaaaccggggatatttcaggttccacgcccatttcccggttgaggacaatgcgggccagcacatccgccggtgtgcggttgacgttgattttgaaaaggaagcggtccagctgggcttccggcaggggaaaggttccttccagttcaatggggttctgggtggcaagcacgaaaaagggggaggggagggcatgggtctctcccatgacggtgacgcggcgttcctgcatggcttccagcagggcggactgggtcttgggggaggcgcggttgatttcatccgccagcatgatgttggcgaagacgggcccttcctggaagatgaagttttttgttccgtccctttcctgaagaaccggggttcccgtgatgtctcccggcagtagatcgggtgtgaactggacgcggcgcgctgtgatatccagtgccctggagaggcctttgaccagttccgtcttgcccaggccgggcaggccctccagcaggatatgcccgcgagccagtacgccaatgagaaccagttcaatgagatccttttgaccgaacaggacctggttcatggcggcagccagagcacggagcttttgcatggcgcagccaagttcttcctgagagaggatagggggggtattcatgggaaactgccggatttccgcggcttttgggaaaaagaccgggcatttgttagatttcttcatgaacttatgccatgcatccagaggggctgcaagcggaaagatagagggacctgttaattttcagcaatatgaagagaaaataccctgcggggtttgagtggtaaatggaattgccgcaatatatgttccatctgttgaaaaaagaaggcttcctggcatgtattattgtcatgccttccgtatatccccccggcaacgaacgcatttacgtggtggacgctctgcgcggctttgccgtaatggcgatcatgctgctgcattttcttgaacatttcatctataattcctatcccgtggcttcttccccaatgatggaagcggccaaccagcagttcaaggaggtcttttttttcctgtttgccggcaagtcctacaccattttcgcccttctgttcggattcacttttgcggtccagtaccgtaaccaggcccggaagggaagggattttgcgggcaggtttgtctggcgcatgtgcctgctggcggtgttcgcctgcatgaatgcagcgtttttcccaggcggtgatgttctgctgactttttcacttgcaggtttgttgctggtgccgtgccgccggttgaagacatcctcgctggtggctttgtccctgtttttcctggcccagccgctggagtgggcctatgcggcggtgcagtggatgcatccgggctgggttcctccctccctgtctgttgcggaatcgtacgcttccctgaaatccgccgtggatacgggaaatttctgggtgatggcctgggagaacctgactacaggacaatgggccagcctggcatggggtattgaagccgggcgtttgatgcaggccccgggtctgttcctgctggggtttgttctggggcgccaggatttctttttgcagaatgacggaacggctgtgttctggacccgcggactgctattttccctggccggggcctgtgcattttacgtggtgatgtgcctgccggggctgccggggcctgtgcataccgtgtttagcatgtggcacaatgtttgctttaccggcgtatgggtggccgggttcgttctgttgtaccggctggaatatttcaggaaagcgacggctccgctgctgacctacgggcgcatgagcctgaccaactatgtttcccagtccgtgatcggctccctgatttttttcccgtatgcactggggctggctccctactgcgggtatctggccagttttgcggtcggctttgccgccatgaccggacagatatggttctgccgctggtggctggagcggcaccgctacggggtgctggaaggattgtggcaccgggcgacatggctggccgccgggaaggtttccgctccggaacaccggtaagaaacgggggcaagcgcaatgatgtttcccgatacttgcgggacgctttttagcgtcttctgccaaagccggtgatttatccggacggaggatgcatccggttccgcaaggggcattttggagaggagacatggaacagggggcagaggcaggaggaaaagggatgaacgtttcatggcggcgggagacatgaaagcgcggtattttttgaagaatggctttccgggagattttttccacagggaacggtctgttttcctggggatggcgtgccgcgccctctccggtccgtgttccggcggcttttccgacggactgatgcaggaggggattccgtaccagatggcgcttttctttaaaggggagatgtagtatggcatggtgtatggaaaggaggacgggcataggcggttttttcgggctggaattgccggagtacggcaatttcccgcaatggcatcccggcaggagtgtagccgtgaattccggcagacgcgctttggaatatatcctgcgccgcctgggggatgtgcgctgtgtccgtgttcccctgtatacatgccggacggtggtggaaacgatggaacggcttggcattcccgtgattacttaccgcattgacgaacgcctggaaccggaggaactgccggaattggaaaagggggaataccttttgtacaccaattacttcggaatcaaggagaaatgcgtggaccgtctggcttcccggtatggcggcagcctgattgtggacaatgcgctggccctgtattctccggcccgttccggagtggcctccctgtacagcccgcgaaagttttccggtcttcctgacggggggatcgccgtgatggatgcggagcggtccttgccggaaccggaggagcgggacgaatccctgcctgccgccgcttttttgctggaatgcctggagcatgggcaggaaagggcttccgccgcctgtgaacggaatgaacggcgcttgcggaataccccgctgcgaagggtttcccggctgacggagcgactgatgagcggtattgattatgaacaggcgcggctgttccgcatgaatcatttcctttttcttcatgaaaggctgggccatttgaaccgtctttccgtggaggcggattccttgtccgctccgtgttattatccgttttggacagcttttcccgagctgaggaacgtgctgattgataagcgcgttctgattcctctcctgtggccggaggtattggaacaggcccctgccagcagcctggaacggaaactggcgctgcatcttctgccgcttcctgtggaccagcgctgcgggccgcaggacatggaacgcatcgcccggattgtggaggcattctattcctgaagagaagggaggattattttgttagacagttggataagacgttgacgatacgggaatgaatgttctgacatttttggtatgtccgactacctttcctctctgtgctatcctttccgtggaaggcccatggtttttgtcttttccgtcatgatggtatggggcatgttcctggcggcccgggatgttctcatcggatggattgccgccttttgttttctgctgcctttcatgtgcgcctttttcatgaaaatggtgaggcagtccgccatgggagaagaggatatctgcccctttcctgaactggatgaatggcttgactccctcatgctgccttttgtccggctggcggtgtgcatcatcgtttccttcctgccttccgccgtgtatgcgcatactgcggcctgggcggcggatactaccctggcgtggctgttcctggcggcgggtgtgatttactttcccggcgtattcatgagaacctccgttcgggaacgtttttccggtctttctcccgtgggctggtgggggcttgtcagaagggctcccttttcctatgccgggttgcttggcgccatatgcgccgggggatggatcatcctgaaccttccttcagggcctttgatggatttcgccatggcgcccgtgaagctgtatgccgcctgcgtgttgatgaatatgtgcggactgttcatgctcaagcatgaatttgccggggaggaagaggacggcagcttttccccttccgggcctgcggcctcgtgatgctgccgcctttccggcggcgccgggaacaggtgagtttatttggcgggttccttgtccaggttcaggatgcccagtacagacatgttgccttccgcatcttttccggaggggagatagaccttcgcattgttcagcatgttttcaaaggccttggcgcggagcatgttcggtcccatggccttttcctttaatgccagtccttccgcttccgcccgggctgcttccagggctgcttccgcctgggccttgccccgcatgacaatgactttggcctccgcttctccccgggccaggttagcgtttgcttcctggcgcgctatttccattttcatggcgccttccgcctccccgcgtgcgcgctggatggcgatgtctttccgggcgatttgaagttccgtttccttgcgttcgttttcctgagtcgtctgaacttttctgacgacggattcaatgatggcctgcgggggatttgtttcccccacggctacggaatccacaataaagggggtgccgtccagccgcttgcttaactgcgtgtaaacgttgtcggaatttttttgcaggctgccggaagcgtccagggcattgtactggcttaattccgcccgcacggctgtgcggaaaggctgctgaatgaaatttttgtaggcaaagagcatgatttcgtccgccacttcgtcatcattgcggccggagctttgggcgatgcctccgtaatcttccatgaattcctttacccgggacgggtccagccggtaaaccagagaagctttgcaggaaatggggagcttgtccttgcccaggatagcccctccattgcgggcgtcgaattcttccaccgtggtatccggcgtgatggaaaccttgctgacttcctttctccacgcccatcccgtggaggacggcccgatcaggatgccttcaaacctgttctgtccgaaaatgggtttggaatagacatatccggcaaagccggacaatacgcgcttgttgctgaaattctggaaggcaaaaatggcggcgcccgcagcgacgaagatgacggcgggaatgagcagggagaagacggttttgggagatttattcatgacagggcagcggttgtgacggtatccaacataagaggaagctggtgaaaatcaagttatcttttcctgtgcggccgggaaaagtgttccactgaaaaaattctttccggaagagggaatgcggcaaagtatgtcctcttctgaacacaggggagtgccggaaatgtcttatccggcaaaggctgcctgttccgtgggggagattccggcgaggtgccggacctccgcctcggaggcgggcctccatttgggttaaggtgatgaatgtagccattacgggatccggcggatttatagggagtcatttgtccaagcgtcttgagatgttcgggcatcgggtggtgcccttgcggcgctatctgtttgcccaggagggcgtggattgtctggcgcaggccctggcgggatgccatgccgtcatcaatctggccggagcgcccatcgaccggcgctggacggatgcctacaagagggagctggtggagagccgcatcatgaccacccgcaagctggtggaagcggtcaacaggctgcatgaaccgccgggagtgatgatttccgcctctgctgtcgggtactatggctcgtccggcggctgtcatggggaactggacgctccggaagcggattcctttctggcggaattgtgcgtggcctgggaaaaggaggccgggctggtgaacagctccgtgcggctggtccttacccggtttggcgtagtcctttctccggatggaggggcgctccccgagatgatgcggccggcccggttcggcgttacggcaaccgcaggaaatccggatcatcttttttcctgggtggctttggaagatctggcggatgccctggtcttcattatgggcaggcaggatatttccggcccggtcaatgtaacggcgccggagctcaccaccaaccgggaattctacagggcagccgcggaacatttccacacccgtctgtccatccgtgttccggacgccgttctgcggttgctgatgggagaagcttcccaggtgattaccagcggccagtgcgccgttccggagacgctgatgagggaagggtttacattccaatatccggatatccgcactttttttaacaaagcattttctgtcaaatcatgagcatgatacagaccatcgttacttccctgtttcacggccattccgtcaaaaccgatcccatgccggatttcaatctggaacgttatctgggggaatggcacgaaatcgcccgtctggaaaactggttcgagcgcgggctcagcagggttcttgcccggtatgacctcagggaggacggttccatttccgtggttaacagcggttatgacgttcgtaccggggaacggaaggaggcgtgtgcacgggcggtggcgggggatgcccccaatcatttgaaagtgtactttgtaccactggtatacggccggtatgaagtggcttttctggatgagaattacacccgcgccgtagtttccggcggttccctgaattatctgtggctgcttgcccgatcgccgcagttgaaggatgacgagcttcagccgatgcttcattgcgcggaaaaactggggtatgatacttcccggttgatttacgccaatgtacaggcctctccggacaaataacatggggcgggcttgaagaagcggcgtgccgtgaatatgggatatttctgaaatggggaatgtggaaaaggtggctttcctcctgccaggaaaaaatttttgggcatgggccgggcgttcctttccggtgttccgccgtgcgggaatgtcatgcttttgagttatccggtgtgattcttcttcctgcatggctccagtcccgtatttttccgctttttcctgccccgtcctttccgttttcttgcaaagaacagggaaaaacgcaggcgcctgtttaaaataggcttgcaatcatgtgcaggatggatatgttgacattcatccaaacattggatgtttggatgaattacttaaagaaggagtaacaatggatattattcatgacaacgccgctgatctcagcgcattgaacggcaagaccgttgccgtgatcggatatggcgcccaggggcgcgctcaggcactttgcatgcgtgattccggtgtgaacgtgattatcggcgttcgccccggcaagtcttttgacgccgccgcccaggatggattccaggtaatgagcgtcgcggaagccgccgaaaaagcggacatcattcacattctgctgccggatgaaagccacggcgccgtgtatgaagctgaaatcaagcctcacttgaaggccagcaagacgctttgctgctcccatggcttcgcgtatgttttcaataccatcgtcccccctgcggatgtagatgtcatcatggtggcccccaagggcccgggcacggaagtgcgccgagtatttgaagaagggttcggctgccccggcctgattgccgttcatcagaacccctccggcaaggcccgtgacgtggctcttgccatggccaaggctgaaggcctgacccgcggcggcgtgctggaatgcaccatggcccaggaaacttatgaagacctgttcggtgaacagaacgtcctgtgcggcggtctggtggacctgatgaagtacggctttgaaaccctgacggaagctggctatccgccggaaatggcctactttgaatgcgtgcatgaagccaagctcatcgtggacctgatttataacggcggcatccagaagatgaactccgtgatttccaacacggccgaattcggcgaatattacaacggcccgcagatcctgcccgcagaggtgaaggaacgcatgaaggaatccctcaagcgcattgaatccggcaagttcgccaaggactggctggaagaggcagccaagggcgctcccaacctcaaagccaagcgcgaagccctgggccagcacccggtggaaatcgtgggcgccaagatccgcagcctgtttgaaaggaactaaggtttcttttacttgaaacacgtgtcgttccgtcggaatacggcggagcggcacgtatattcccgggcttttcccggaaatccgccattgattcagtttatggagcatgcctcaccggccgtcaatgtagaaaacgccagggtatacctgggcgggcacgaaatcctgcacaatatttcctggcaggtgcagcgcggagaacgttgttttattctgggggccaacggcgccggaaagacaacgctggtcaaagtgctgatggggtttgcatggccgctcttcggagccagggtgcaggttctgggcaagaccttcgggcacgtgaacctgctggaattgcgcaagtccattgcgtgggtgagtccgttcatgcacaagtggctggaggatggctcctggaacgggcgcgacatggtgctttccggccccgacggaactatcggcctcctgagggagccgacgccggaagaggaggaaaaagccgcaggaatcatgaaatctctgaaagcggagcatttgatggacaggccggtggtggccatgtcttccggggaacaggtgaaagtgctgattgcccgggctctgatgacgaatccggaactgatgattctggacgaacccagcgtttacctggatttggcagggcgggaatttttgttgaaaaccattgaagaactggctgaaacgaggcctgagctgaccattgtgttcatcacccagcgcattgaagatatccttcccgtatttaaccgcggcatgattttaaagtccggagaaatcgtggcgcatggaagccgggacgaggtgctgacggaggaaaacctgaaagacgcctttgggctggatatccagttaatcaagacggagaaggggcgtctctggaccgttatccgataatttttcatgaagcagtccaagacaatggagctgaagaaaccggtgcgggtgtccctggcccgccaggtgcttaccgccatggaatccatgatacggtccggcaaatggaaggttggagaccgcattcccgcggaagcggaactggcccgtgccttttccgtcagccacaataccatccgcgaagcccttcaatccctgattcacatggggatgctggaagcgcgccccggggacggcacgtacgtgatggcgtcagaccgctttgccgtcgcggtgagcaaccgcctcaaggaatccgagctgcctcagattctggaggcgcggctggctttggaaaaggaaattgcgcggctggccgccgttaaaaggacggatgaagatttgaaggagctggaaaatgccctgaaggactgccacggcagggtaaggcagggcattgaggatgacatgctgtttcatgccgccgtggcccgcgccacgcataatccggtgctctcggaattgtataacgtggtcatccgccatgtgcaggagaatctggaaaagctgcttcaggagaagcaatacgactccggcgccatgaagctgcatgacgaccttctcgcagccatcaggaatcaggaggcggatgaggcggagaacattattgtaaagattgtggaatttgacaccgtcagcataggcgggtcattcatttcttgaattgccggcaggaaagatgccgttgcggtggcagagttattcttttttatttcccggtgcttttcttgccagcgggctttccggcaaataactgcgttctggaattgcctgccaaatgaaaagcgggaatttagtctttccgtaccaaggcgccggaggcaattctcatgatttttatccttttccggatatggaattttactacaattcgaatatggctattcacactgaatggaagtgcccggcatgcggtgcccttctggctatggaagatgtgaatatggctgcggatatggtgttatgccgctcctgcaataagataagcaaattttcagagattgttcaggaggaaagggatgaggaaattcttgattccattccccgccgcatgagcgtgacgaaaacggcgagggggctggaaataacgtacaagaagccaaaaggtgcgggactttttctactgatgttttcaattttttggaattctgtgatatgcgttgccctgtttgaggtgatgagggaaatgtcttgcgagaatctgttcgaactattgtttttaatcccttttgttctggttggggctggtacatttacgggagctttttatgtgttgtttggccgcatgacgctgatcctgataccaggcaggggggaattgttccgaggagtggggagcctgggccgccgacagcagtttttgctggagaaggattcctgtatttccattgaggcaagcagtattcgacggaatcatgaagttttaaacaagattgtagtggggcagccggacggcaagacgtttgagtttggtacagggattgaggaggcggaggcccagcagtatatagcggctttgctacggaaaatgaggggatagggctgtgatgcctgaatgcggagaaggtcttggaatgccctggctccgctgtttttcggcagagcggggtaatttgtccgggagggaaggggcggagatggatttccgtttccagaaaggaatggggagtaagcatttttgttgttggcaaaatccatggatagcaggcagggggcatttgaggaatgatagcggaaatttcgggaatgaggttttttgattgatatggagaataaggtacgtagattaacgtatgatgaaggaagtgcgccttttgttaattctgtgcggtttgttttgcggaacggcagttgcgcagccccgcctttccacaccgccgaacatgattgtcattctggcggatgacctgggttatggggatttgggctgtacaggttccaagcagataaaaacgccttcccttgaccggctggctagggagggggtgttttgttcccgggcgtatgtgacggctccgatgtgttctccctcccgcatgggactgctgacggggcgtttccccaagcgttacggcatcacgacgaatcccaatatccagatggattatcttccggagtcccactacgggctgccgcagacggagaaattgattccggagtatttggctccctgcgggtaccggagcgcggtattcggcaagtggcatcttggccacacgaagggatatacgccgccggagcgcggttttacgcattggtgggggttcctgggcggttcccggcattattttcccgtgaagaaagaagctgaaggcctgaatccctccatgattgtatccaattttacggataagacggacatcacctatttgacggacgacattacagaccgggcggttgaatttctgcaggaagccggaaaggataagaaaccgtttttcatgttcgtttcctacaacgccccccattggcccaatgaagccaaaccggaggatatcgccaaattcaggaacgtgcagaacggggaacgacgggtttattgcgccatggtatatgcgatggacaggggaataggacgcattctggatgccttgaaagcggacggtttggaaaaggataccatcgtcgtcttcctgtcggacaatggaggcgctccggaagcttcttcctgcaacgcccctttccggggtgccaagaggcagcattttgaaggaggtgttcgcgtaccttttattatcaggtatccggcggacaagcgtttggttcccggaagcgtttgcagacagcccgtttcctccgtggatttgcttcccgctttgctgaaggcgaatggccgtcacattcccaggaagctggacggcatggatattctggagctggtggggaacaagggagctcccgttccgcgcacctttttctggtgcacggattacacgtccgctgtgctggccggtgatatgaagtacctgctggtcccggatcgcgctccgcagttttacaatgtggcgggcgatccccaggaacagagggatttgtatttttccaggcaccaggatgcggatcccctcgctaaaaagctgggaacatacctgactacgacgcctgcatgccgttttcccgacagcatcagctggtccgccaaattgatgagggagtatgacaagactgcgccggacaggcagcctgagtaaggctgcgttggctttgttccgtattccgtcctgcatgccagcgtttgggaacctactacggcgggagagggggaggaaccgcgtgcatggttttcttttcccgctgaaaaacgctttatttcaggcgcttgggttccgcaatgcggagaatgtgctctccgggaagggccaggttgcctttgtcccgggcaatcatttcaaagtagtggggatcctgtgagatccagatgaattcgttttttgcctgttccatctgctccctggatttttccagatgagcctgaaggaaggaacgttcatgctccagggagcgcagatccttccatggtttgaaacacaccagggaaagcagcatcgtcaggcacagggccaggacaatggcaaagaggcgcagggctctctggacgatcagggcacgtttctcccggcggatttcaagctccgccagggtaaaacggtggtagtagcggcgtctccagagcattccttgcagtcaaacaacatatttttgatcatagaatatgaattttaccaccataaactgcgtcatttcccagttcttcttcaattctaagcaattgattgtatttggccatgcggtcggaacggcttagagagccggttttgatttgccccgcgttcgtcgctacggcaatatccgcgatcgtggcgtcttccgtttccccggagcggtgggagatgatggcggagtatttgttatccttggccagttccaccgtatccagcgtttccgtcagggaacctatctggttgactttcaccaggacggcattcgcgacatggcgggaaatgccctgattcaggaattccacattcgtcacgaacaggtcatcccctaccagctgggtattgccgcccatggctttagttagctgttcccagcccagccagtcgttttccgcacagccgtcctcaatggaaatgatggggtattttttctggagttcctgatagtaagccgtcagttcctccgctgttctgcccaggccgtctgattttttgaagacgtacaggttccgggagggatcgtagaattcggaggaagccacgtccagggcaatgaagatatccgtgcccagggtgtacccggcccgttttacggcctgtgcaatgcattccagggcgtcgtctgctgatttcagagctggggcgaatcccccttcatcccccacggcagtggaaaggccgcggtcatgcagcacatccttgagcgcatggaaaacttccgccccgtagcgcagggattcccggaaagtgggagcccccttgggcatgatcatgaattcctgaaagtcgatgggggagtccgaatgggctccaccattgatgatgttcatcatggggacgggcaaaaccttggcgttcggtccacccaggtatttgaaaaggggaaggttgagctgaatggcggcggcttttgccacggccagggagacgcccaggatggcgttggcccccaggcgggatttattgggcgtgccgtccaggtcgatcatgattttgtcaatggcaagctgcagggtggcatcgtgccctgatatttccggggcaatgattttattgatgttttccacggctttaagcacgcccttgcctccgtagcgcttggcgtctccatcccggagttcccaggcttcatgttctccggtggaggctccgctggggacggatgcgcgtccgatagctcccccggcgagggccacgtccacttccacggtgggattgccccgtgagtcgatgatttcacggccgcggacgtcaatgatttccatttcattcatgatcataagatttctttttgtcctttttagacagggaaacaggctttcccgttccggagaagcatgtcatgtccctagaagttccggtttcaaaagcaggactgacgcagaacggggacgaagcttgcaagcttcttcagggccatgatgccccgcagaatgaagaggttcccttgctgggcatccgcctgcccgttcttaggaattttgccgggaagaagctcaggagaatctggcaggacaggatgtcggcgaggtgcatgaaccctcaaaggggcaggagcaaccgcttttgcacggcggaaactgcggcaggggggggaagctgcgccgtttcgtgacgcagggaaggacggcatgccggaacggggccttgattccgtcccgttccgggtatggaatgaggcgcttactattaaaaccatgcctaacattaacgataacttcctcaagttgcaggcgggatatttgttcccggaaatagggcgccgcgtgaatgcgtttgccgaatcccatccggaggcggccaaaaggctgattcgctgcggcatcggcgatgtgacggagccgcttcccatggcggctattgaagccatgcaccgggccgtggatgatttgtccactcatgaacgttttcacggctatgggccggagcaggggtatttctggctgagggaggcaatcgccaaaaaagcctatcaggcccacggcgtgcatgtggaagtggatgagatttacgtgtctgacggagccaaatgcgacacgggaaacattctggatatttttgggcccggcaacaaaattgccgtgccggatccggtttatcccgtgtatgtggataccaatgtcatggccgggaataccgggagttccagcctggatggttcttatgaagggctggtgtatctgccgtgcactccggaaaataattttgtgccgcaattgcctgatgagcatgtggatttgatttacctgtgcttcccgaacaatcctaccggggccgtagcttcccggaatgaactgctgaaatgggtggaatacgcccgggcgaaccgtgccattatcctttatgattccgcttatgaggctttcatacaggattcttccattcccagatccatttttgaaattcccggcgcgcgggattgcgccattgagttccgttccttctccaagcaaggaggctttacaggggtgcgctgcggttatgtggtgattcccaaggaattgcacggatatgattccgaagggaacaaggtttctatcagccgactctggagccgccgcaccagcacgaaattcaacggcgcttcctatattgtccagcggggtgccgcggctttgttcaccatggagggcatggcccagactgccgcgctcatcagccattacctggggaatgcttcgcttctgctgaatgcctgccgtcaggcgggcatgcgcgtgtggggcggggaaaacgccccttatgtatgggtacagtgtccggacggtctggacagctggcaaatgtttgacaagatgctgcatgaggcgaatgtggttattacgcccggttccggttttggttccaggggggaagggttcttccgcatttccgcgtttaattcacgggaaaacgtggatgaagtctgccgccgcatccacagcctgtttgccagatagaagggcgttttcagacagatgtccaggccgcggtgcaaaacaccgcggcctgtgtatttctttccgggtgggttgatgaccgtggcattgtatttcctgccgggaggggagttcctgtaaaaaggtcatcttcctttcttacggatttggaccgggaaagagcagagtccgttttcaagtgatgggattccggtaaaggggcgtttctatggcatattcggcccttgccctcgttcatttgtacggagtaggttgttgcttatgtccccgtgggtgcgcatgagttcctttttccggcaggctgcttttcctgcatgttgcgcctgcctgctgtctgttgctggcgccatccgggggcaggaaggggaagcggagcttccttctgtggagccgctttcctgtgcgcatgccccggatgggagggtaacagttcggggggcggttatgggtacggtgttcacggtgcgcgcttatcccgggagtggcatggacgcggaagatgcggagaggatttgcggggaggctctggcctgtgccgtccactgggaaaaagtgatgtccgccatggatgcggaaagcggtctgacccggcttaatgctgcggaatacggcatttccgtgcctgtttctccggaattggaaagggtgcttcttctgtccctgaattatgcccggctgacaaacggtgcttttgatcccacactgggaccctgcattcgcctgtggaaaaagagccgccgccttggcgtcctcccgtccgatgaggagcgggaatgcgcactccgggcatgcggatgggaaaagttgtccgtccgtaagggaatggcggtcaaggcggtttctggaatgaggctggatttgggaggcatgggcaagggctttgccgtggaccgaatggcggagatgttgaaaacaaggggtatatgttccttcttcatagacagtaccagcgatgttctggctggcgctcctcctcccggggaaccgggatggcggctgcgggtggatacaggaagagggcagggggaagtgttgctgttgagccatgcggccgtttccacttccgggagcgcccgtcagatggtgaaaattggcgggaaagcgtattcccacgtgcttgatccccggtcggggctgggcgttacggaagggaggcaggtgagcgtccgggcgtcttccgctgcgctggcggatgccctggcgacggcagggtgtgtgatgcgtgaggaggagttccgttccctggcggccggattgccgggagtgtccgttccggccttttttcaaagtccgccatgttctgcgggggaaacgcagaaacaggatggactgcggaaggagggaggaatggggtcaatgaaaggaatgacaaagcaactacgtttttaagatacacctttataaccctgtttatgagattgtaccattttttactccctgccgttgtcagtgctgccgtatccgcatcatttggggcagagtttcccaatccctatcctgcgcccgctcccggtgtccgcctgactccagagattccgctttcaccctccattaatggcgcccgtatcgtcggggctacccccggctcccgcatgctgttccaggttcccgtctccggggagcggcccatgaaaattcaggcaacagggctgcccccaggcctgaagatggattcgcgcggattgattgcgggtaccgctccgtccgggaagagggaatacaaggtaaatatccaggcttccaacaggcatggaaaggacatgaaggagctgattctgaaggtgggggacgaattgtgcctgactccgcccatgggctggagcagctggtattcctacagtgaggccgtagggcaggataatgtgctgaagacggcacggctttttgtggaacggggtctggtcaatcatggctgggcctatatcaacattgacgactgctggcagggcaggcgcggagggaagtatggcaccattcaacccaataagcgttttcctgacatgaaggccatgtgcgacgctattcacgccatgggcatgaaagtgggcatttattccacgccttggatgggaacgtatgccggttttatcggagggagcgcgcccaacgctaagtcggactacggggaaatggccattccggaaaaggagcgcaagcaggaggatcaaatctttggaagttatccgggagttcatcgcagaaaggcggatcatgtgggagccgtctggctgtttgaccgtgacgctaaacaatgggcggattgggggttcgattatgtgaaagtggattggaatcccaacgatgtgcctacgacaaagcgcatccgcaaggcgctggacgagtccgggagggatatcgtgctcagcctgtccaatgccgccccgtacgaacatgtggaagagctgggcaagctggcgaatttatggcggacgacgggggatatccaggatcactggggcagcgtcagcggcatcggtttttcccaggaacgctggcagaagtatatgcgcccgggacattggaatgatccggacattctccagatcgggaagctgggcaaacccaaccagcccaacaccacgtttgtccagacgcggctgactccggatgaacagtacacccatgtgaccctgtggtgcctgctgtccgctccgctcatcgtctcctgtgatttggagcatattgattcgtttacgatgggactgcttaccaatgatgaggtgatagcggtggatcaggatccggctgcccgtcccgcccgcaaagcgtggcaccaggggaatttccaggtgtggatgaaggagttgtccgacggttccgtggcggctggctttttcaataccgggaaggagaaaggaattttgaaggtgaatctgaaggagctggggctttccggagcgtatgaggcaagggacctctggaaacgcgctgaccaggggaccgtacagggagatatggcggtagaattgaacgggcatggagcatccatgttccggttcagcaaaaagaagtaacgggaaggagacggctctgtattcattcaggggcggcggggatatgccgcccctgaagcctgtggcaggggaggcttttcattgaaccggcatccatagaaacaagccttctgcacaaaatcccacttttacagtacctgtcggcggattgccggattccaggaggggcaggaggggcagtgaatgcctcccccgcaccagagcttgcgcttcaattccggaaagtttttcctggcaggcctttgttattgtgtaataaaaaaccgctccggcaaatccggagcggtttttataaaagagattgatgtgacttgccttaatctctcccgacagcttttctaggcggcaatgccgaaatgctgctgaatggaggcgaaaatcttgtcgcgacgggcgcgggctttttcaatgtcacgggttttcagcgagaatctcaggcgttccgccgtggagtccggcttgtgaaccgtaacgtggcaccaccaaacccccctgttgttccacaggtggtggttggggttgtcatcattaattctaagagcgattttggtttgggctttcatctgtgtgatcttttccagtagaggacgtattgtttacgcccgttggcatattaatgtttcaataaaaccttcaacttggaggtgcctcacttaagcagatgatcccttgtctttttggacatctttttctgccagttgctcacctcgttgaagccttagagttcaagtggtggaacaacgttcaaaaaaagaatcttttttacaggagacctacttttttaagagtgttgtaagcaccgttcttgttgatcgtacgcagggccttggcggaaatcttcattttcacgaattgaccgagttcaggaacccagatgcgcttctcctgaaggttggggaaaacggtacgattgacagtcttagtgacgtgacgaccaataccgccctttttcttggcaagaccggagcgatggatacgacgacctttgtgaggcatggtacctctgatgatgcaaattcgggacatggcaatcgaagttatttgttaatgcgagagagataatctagcgtatttttgcctaaggtcaagaacaaccggacgaaagccctggaatttatcctggactgtacggaagcatgccttttcttttgcgcgaactccggttttttctcccatgatgaagaggggctgcagagacggtgagctgaaagcgggagggggctgatccgggaagatgaacggtaccgcagacaaagaggagaatgaggcgttcttccatatttttcaggacttccgtcgtgggagcaggggctggccggatgaaggcctttccccgcaggaaaagtgcagaacacgggaaagatggccccctttggttttttcacggcagcggcatatagcggcatatggctgcctgcttccgggtaaaacgtatccggcgcttgcacggaggggcgttccatgagaaattgaaagcatgagtgagaatcattatgcagagttttccgaatgcagcatgaagccccaggaggtgctggaatacgtttccggccccattcccgttccggaggagggagaagttctggtccggatgaaggcggctccgatcaacccggcggacatcaattttgtacagggagtttatggcctgaagcccgtgctgccgcactcccgcgccggcctggaaggctgcggcgtggtacaggaatctcgcgcagagggattccgagagggagatgaagtgattctcctgcgcggcgtgggttcctggagcgagtatgtggcggttccctccgtgaatgtcatgaagctcccggtgaaggtagatcccgtccaggcggccatgctgaaggtgaatcccctgaccgctctgcgcatgctggaagggttcgtttccctggaaccgggggattggctggtgcagaatgccgccaattccggagtgggaaggtgcattattcaactggcccgtgaaatgggcgtgaagacagtgaattttgtgagaaggccggatgaattgagggatgaattgactgcgctgggcgccgatctggtggtgggagaggatgacggggatgtggtgaagaatacgctggcccgcctggatggaaagaggcctgtgctggcttccaatgccgtgggcggggaaagcgccctgcgcctgatggatatgctggctcccggcggaagcatggtgacgtacggagccatgagccggaagagcatcaaggtgccgaacggttttctgattttcaagggtattaaactggagggcctgtgggtgacgcagtggcttaagaatgcccctgtttcagagattgaggccgcctatgagaaactggcgcgcctgatggcggacggcaggttgaagcaggctgtggataccgtttatccgctaagcgatgtgcggaaggctgtggagaaggctcaggaggagttccgcagcggcaaggtggtgcttagcatggattgcgcctgatgcgtggaaagggagtttttgcgctttcccgtgctgcggaatgctggaaggattttttcagtgttccgtagtttgggtagtattggctgctggcctggatgatgtcggggctgaacttttattccatctggcaggcaggcgatttgttctggaaaagatccgttttgctcggaaagggctgtgtacggagggaatggtgcggagcgtcacgaaggatacggtgcggttgtggcgccattcgcggatcatgaacccgtccgggctttctctggatgtctgggcaccggaagtgcgttcccatccgcagacccgggagggacggcgcgtgcgcgccgtttggtttcagcccagcgtggaatcaagccaggtgttgagtatttccacagcggctatctggtcgatgatggggcggaagttttttgcctttttgcaggcggcgtgcagtttttcctgggcaatgacggtggtgaggcattcatccatgaaaatcaggggaaggcctggaagggctgcggccagttccctgccgaatgcacgcaccttggctgcggcggtcccttccgtgccgtccatgcggacgggaaggcccagcaccagggtgcgtattccccgttcctggacgagctggacaatgcgggaaattccgtccgtctgatgcctgtggatagtttctacgggatgggccatgatgcccacggggtccgtggcggcaatgccgatgcgggcttctccgtagtcgatgcccagggcggggtgcggactggtcatctgagttcgtccggaagctggttgacgattttcttgatttcgtccgccttgtttttatccgcaatgaggatggcgtccgccgtttccaccacaatcaggttttccactcccagcagggccacgtgcttgtcccccttttgggagaaaacaatgttgccggaggcgtcctgcacggtgatgtccgtgttggtggtgtttttattgtgggtttccagatagttggctacggagatccaggaacctacgtcgtcccagtcaaaggttgcttccatgttcagcactctgtccgcatgctccatgagcgcgaagtctatggagacgggggtgagcgccgggaattcttcccggatggtttcctgcggggccggagattccgcaacgtgttccacgaaggaggccagttccgggcagtgcttgtccagctgttcgcacacggcaggaatgctccatacgaacatgccggcgttccagcagaaattgccccggctcaggtaggctgcagccgtggccgtgtccggtttttcgcggaattgaatgacttcgcggcaggaacagcccggagcggagtggatttcttttccgcgttcaatgtagccataggaggggcagggccaggttggcttgatacccacggtgacaagcgctttttccctggcagccgtgtccatggcggctttcatcagggtgcggaaggagtcctggtcctgaatgagctggtcggaggggataacgagcatgactccgtgcgggtccgccgccttgatgagaccaatgcccagggcgatggcaggcgccgtgtcccggcgcacgggttcggaaatgatgttgtccacgggaatatcgtgggcctggcggcgcacttccgcttcctgcagatggttggtcaggataaagatgttttgcctgggcaccagcccgtccagcctgtcgatagcctggcgaaggagggttccttctccgaacatgttcaggagttgtttggggcggtggtcgcgggaaagaggccagaaacgggtgccgctgccgcttaccagaataagagcgtattggttcatggctgtttcgcaggaatgggggttcaagagggtcagagagcgccgaaacggcgttttctacgggagtagtccagcagagcagcttccatgtcccgatcgcaaaagtccggccacaacgtgtccgtcacatgaatttccgcgtagctgatttgccagagaagaaagttggagacgcgcatttctccggaggtgcggataagcaggtccggttccggcatgccggcggtgtccaggtactcgccgaacaggtcttccgtcacggcgtccggcgggagttctccgcgggagactttttccgctattttcctggcggcggcggcgatttccccccggctgccgtaggaaatggccagaaccaggttgagcctggtgtttcccgaagtggcttccagactgttctgaagcagtttccgggtgcgggcgggaatgcgggagagatctcctatggcgtggaggcgcacgcctttttccatcatttggttgaggcgttttttcaggaattcgtgcagaaggagcatcagcgcgcgcacttccgtcttcggacggttccagttttccgaggaaaaggcgtaaagggtgagccaggggatatcatgggccatgcagaagtccgcacagcgttccaccgtatccgctcccgcccggtggcctgcctgccgcggcagatggcggctgttcgcccagcggccgttgccgtccatgatgcaggcgatgtgagtcggcagtttttccttgggaatggtaagcatagataagcgtcgctccgttactctagtccatgaccgggtccagttcaacacgcaagttgttcaggatgtattcctgtctttcccgcgtgtttttgcccatgtagaaggacagcaggtcttttaccttgtgggaatcttccagccggacgcggtccaggcgcatcccttccccgatgaaagccttgaattcctggggggagatttctcccaggcctttgaaccgggtaatttccgggtttttccccagcaggctgatggcttcctccctctctgcgtccgagtagcagtaaatggtttgctgtttgttgcgcacgcggaagaggggggtctggaggatgaagaggtgtccctcccggatcaattccggaaagaactggatgaagaatgtcatcaaaaggatgcggatgtgcatgccgtcgtcatcggcgtccgtggcgatgactaccttgtcatagcgcagttcctccagtccgttttcaatattcagggcatgctggaggaagttgaattcctcattttcatagacgactttacggctcatgccgaaggagttcagcggcttgccccgcagggagaaaacggcctgggtttccgcgtcgcgcgccgtagtgatggagccggaggcggagatgccttccgtaatgaagagggtggtttccccggcgcgggagtgcttggagttgtaatgcacccggcagtcccggaggttcttgttgtgaattttggccttgcgggcgttttcgcgcgccagcttctggatgccggagagttccttgcggtcccgttcggaatccttgatttttgcttccagagctttggccgtttccgggtttttgtgcaggtagttgtccagctccctggcaatgaagttgcccacaaaggtgcggatggtttccccttccgggctgatggtgttggaccccagcttggttttggtctgggattcgaagacgggttcctttaccttgatggagatggcagctacgagggaggaacggatgtcccccgcctcatagtttttcttgaagaagtccctcagggttttgacgatggcttcccggaaggccgcctggtgggtgcctccctgggtggtgtgctgcccgttgacgaaggagtagtgctcttccccgtattggccgccgtgggtgaaggccacttcaatgtcatgcccttccagatggatgatggggtacaggggttcctcgctcatcgcttccgcaagcaggtccagcaacccgtttttggagatgtagcggcgcccgttgaagtgcaaggccagccctttgttgaggtaggagtagtatctgcacattttttcgatatactccggccggaattgcgtggccgctggaaagatatccgggtccgcgtggaaagccgtgcgggtgccgttgggttcctccgtggcgccgtcctttcgtcccttggggatttcctttccgcggcagaactggtaggaacgcgtttccccgtcgcgataggcctggatttcaaagaagtcggacagggcgttgaccgccttgatgcccactccattgaggcctacggattttttgaaggcgtcgctgtcatatttggccccggtgttgattttggcggcgcagtccagcagtttgcccagcgggatgccgcggccgaagtcgcgcacttcgcacaggccgtccggagtcacgtcaatggtgatttttttgccgaaccccatcacgaattcgtcgattgagttgtcgatgacttctttcagaaggacgtaaatgccgtcgtccggggaggctccgtcacccagtttgccgatgtacatccccgggcgcatgcggatgtgttccctccaatccagggttttgatgctgttttcgtcgtaggccatgtgcaacggggtcgcgcttattatagcggcgcccccggaatttgcgaagaaaaaatgaggggccgtccgtctgcgttcgatggagcttgacccggaggccgtcccttggtggaatccacggcgtatgatcagttgcaaggctccgtgcaaagtgaacgtttccctccgcgttctgggaaagaggccggacggcttccatgaggtggataccgtgatggttcccctggatttgtgcgatgtgctggagttttcgctggcggcctgtctggagatgagctgcgacgccccgggcgtgcctctggatgagagcaacctggtcatgaaagcgggctgactgatggagcgggagctgggaaggcccatgccgtggcatgtccgcctggtgaaaaaggtgccccatggcgcggggctgggcggcggcagcagtgacgccgcatgcgtgctgcgcaccctcaatgagctggaacgcggaggtttgtcccgggagcgcctggcggagctgggcggggaaatcggttccgacgtggggtttttcatttatggcgcggcgagccgctgcaccgggcgcggagagaaggtggagctcttgccggagtggaaggggtggcgtccctgggttgtcttgttgaaaccgtcgtttggtgtctccacgccggacgcttaccgccgctggtccggttccagggaattgcccggcattccctatggggaacaggatgtggacggccatgtgctggtcaatgatctggaaaggcccgtgtttgaaaagcatttattcctggcggaagtgaagcgctggctgatggggcggcccggggtgcgcggcgccatgatgtccggttccggttccaccatgttcgccgtggtggaggatgaaggaaccggacgcgcgctgatggaggatgccgcccgggagctggaccccactttatggatgtggtccggcctggtgatgcaggataacgcgcggtaaaaacatgattccgcaggaggccttgccttgacggagggggaggcatgccgttacactccgtccatgattaagagtttgttggcaggcatgatggtggcggctgtatgcgccgtccaggccggtgaatatggggacagcgccgtccgggccgcccgggagctttccggggcggtgaagacgggcgacatgatgtggatgattgagaagatgtacccgcccatgaagaagcagcttgttgcttcctttccaggcggggaggcctccttcatggagaccatgagggaaaagatgcaggccgccgccgccgtgatgaaggaacgcggcatggtggtggagacgtatgaaataggccagcctgcggcggaacatctggtgaagggcggcggggaggtgctggtggtgcttcccacgcggatggtcatttccatgaagcgtccggacggggtgcccgtgaaggtggagaataccggtgttctggtgctggtgaaggatttgaaggataaggggccctggacgttcatcgacgcttccagaatgaatgcgaacggcttgcgctccatgttctatgacctgcctgaaaaggtgaatcttccgccggtttcttcccgccagcttcccgtgggccagtaagggggggcaggttcccacatatgaaggccgccggggaagagggcatggaaggcgtcagcgcttttgaggcttatgtccaccgggcatttgccccggacggattgttttcccgcgccagggattttgagtaccgggcggagcagcagagcatggccctggctgtggcgagggcgctccaagtggatgcgccgctgctggtggaggccggcacaggcgtgggcaagtccctggggtatttgctgtaggcggtgaagtttgctttggattttgaccggaaggcggtgatttccacgcataccatcaatttgcaggagcagttgttcaacaaggatattccgctgctgcgcaccgccctggggattgatttttccgccgccctgctgaagggcaggcagaattacctgtgccatacccgcctgcggcgcgcgctggcgcagatggattccctctttacgcagggtgaggccgcggagttgaagaggatccaggactgggccctgagaacgcaggacggcaccctgagcgatatggcattccggccgtcttccaaggtatgggccatggtctgcagcgaaccgcatgcgtgcagcatgcgccattgcggcccttcctgtccgtaccaggcagcccgcaagcgggttctggaggccaaagtagtggtgcttaaccataccctgtttttcgggctgatggcccaggcggaggattccgaggaggcgggattcgtgtttcccggggattttgtgattctggacgaggctcacatgattgagaacatcgccgcccgccagctaggtgtccagctctcggaaccgcatttgaattatgaattgctgcggatgtacaatccgcgcacgcacaaggggttgctgaaaccgctgaacaatccgtccctgttccagcgggttcaggacgtgatggacgcctccggcctgtttttccagaatgcgcgggatgacctggggtttgctggttccggaaagattgtccgcattcttcagccggagtggtcgcaggatattctttctcagcctttgatggaactgatcggggaattgaaaacggagagggagaagcaggaggaaaatgcagccgtgaaggatgaactggcggatatggccgtccggatggaggaggcgcaggcttccctgaaggtgctgatggacatgacggaggaaggtcacgtatattgggcggagcgttccggtccggatagaaggaacatgagcatttgctccgctcccgtggaggtgggagatattttgagggaacgcctgttttccgccggacgttccgccattctgacttccgccacgctggggaccggagatgcggatatgagttattttgcggggcgcgtaggggcggaaagcgttcggaagcttcagatcggaagcccgtttaattaccgggagcagatgcggctgattgtagcccgctccatgccggagccggaccagccggagtatgcggaagttttgccggaatggattaaaaggtatctggcggagtcccgcggcagggctttcgtgctgtttaccagctatcgtctgatggttcaggcggcggagaaagtgcgtcctttttgcgaggaacagggatggacgctgtatgtgcaggggcaggatatgcagcggcatgccatgctggaggcgttccggaaggatgtggacagcgtgcttttcggaacggacagtttctggaccggggtggatgtgccgggagaatctctttccaacgttattgtcacgcgcttgccgtttgaagtgccggatcatccgcttgtggagtcccgttttgagagtatcagggaacgcggggggaatccgttttacgaatattccgtacctgtagccattttgaagctgcggcagggggtagggcggctgatccgcaccaggagcgattccggtatggtggtgattcttgatccgcgcgtagctaccaagaggtatggaatgcgttttctcaagtccctgccggaggcccggctggagtttgtatgaggttttttcaggatgccccagaattgttccgttgcctctcctgccgcatcaggaggtagctgaggggttgttccaggcgcgcttcttccagaagggagcggtctgcaaagatgtcgggaacgggagcgtctgccaggatggaaccgtctttcattacgatgcagcgcgtgcacagatccatgaccatgtccagatcatgggtagcaatgattttggtatgggtgaattggcgcaacaggctgatgagggtacggcgggaggcagggtccaggttggcgctcggttcgtccagcaccaggatgtccggactcatggagaggaccgtggcgatggagacggcccgtttttcccctccggaaagatggtgggtcattttgtctgccagggcttccgcatggacatcccgcagggcctgttccacgcggcggcggatttcctccggggggagccccatgttgagcggcccgaaggccacgtcttcccggacagtaggcatgaatagctggtcttccgcctgctggaagaccattcccacgctttcccggacgcgggcgacggttttgggggtcacgggaatgtcccctacccgtacctgaccggaagagggggtcagcaggccgttgaggtggagcagcagcgtggatttccctgcgccgttcccgcctacgacggcgacggattccccgtgggtgatgcgcagggaaacgccgttcagcaccggaggggaatccgggtaactgaaacacaagtcaatagtttctacaaggtggtggctcatgggatgaggctgcgggcgtactggcccgcgagcatggtgatgttgaaacagcggaacagaatgacgagaatgcagaaaagaaggcctcccgctgcgccacggccagtgatgacgctgcgggaattgacgaattcaggatcttccccgcctctgcacaggacggcctggtaaatgcgttccgcccgcccgaatgtccgcagcagaagttgtccggccatggccccccacgtggaaagagggatgggcccggagcctccccgccgggagcggaatgccatcagcatattctggcattcatccaccaggataaaggcgtaccggtacaggaaggtcatcagcgtgattagaatgcgcggagcgccgagctgcctcaggccgcggcagagaggcgcaaagcctgtggaggccaacagcgtgaaggcgcccaggatggtgagcatgcacctcaggatgatggagatgaaggagatcatgccctgcgtgacgggaatgccgaaccattctcccatgggagttctgtccaccagagggttgaagaggcctatcatgacggcgacgggcagcagccacagggtacgtttcagaaggtagcccaggggaaggcccgccaggcggatgacacagaccgggaacaggaagaaaggcaggagtcccgtaatttcctgcggaggccaggaaagaacgcagatttgatagacgaggaaagctccgattttaatgcgggcgtccagacggtggatgccggtatttccgcaggaaaaccgatccatctggcggaattgctgcgaggcgtccgtaaacagtggcatggggagggtcagcgggggcagtggctgtgcggttttctgccgaacaggaaaccggccgcaaaaataagggctgcgataatggcgcttcccagcacgccggccatgctcgtttcagggttgacaatggaggaggaagcttccgtttccgcggtgtttgccccgtcatcagcgggaaaggcgtagtccggcataatggcggtggcctcctgtacggtttccaggttccggtggaggggggacggttccgccagcctggtttcttccgacccggtgactccggctacagaccattccagtccgtcaggataggcggaggcgaaccaggagagggcggctccgcagagcagggccgctaccgcaaagatgcccaaaacggtccaggatgcttttttgacggttccggtttccaagtcggccgggcgcagcagggacggctgtgccttgctgatgaagatgacgacggctgccgtagcaaggccttctacggcgccgatggccagatgaatgggcagcatcaattcaacaaattgggcgaagggcagggctgagatgccggaggccgttgtttccagaacgacggagaaagcccccatctggagcccgatgacggcggcgatgacgctggccagcgtgatgcggcccgtgccggtttttgttccggccaggggcctgtaaatgaaagggtaagctaccaggcaggagaaaaaccccatattgaaaatattgcagcccagggccagcagtcccccatccgcaaagaaaagggcctgcaccgtcaggatggccgccatgaccaggaaccccgcatacggccccagaaggaccgccaagatgaggccgccgcccagatggccgctggagccggtgcccggaatggtgaaattcagcatctggcaggcaaagatgaaggctcccagcacgcccatgagcgggacgagtcgcatttctttttcctgcctgaccttacgtgcgcagagcgttgtaattgcagcggaagccgcccacatggtgcagcctaccgccggtgagatgaagccgtccgccatatgcatgatgttgatgcctttctattgaatagtgtgaagtattgctgaaagccccgtaccgggcagattggcgccactttagcataaacgccgcaaagccgaagaaggaaatgcggcaacggaggaaagtatgttccttccgcttctcggttttggttcccgtgcggagccggtaaggcctgtttccggcaaaagagcctttccggagggggaacgggagggagggcgcgtttcttcgggtgcatccggcggcaattcatctgccgtcccgtgcttacaaagggtgtggacgggttgggcgtgatgcaggcgggaaaactgtctgctagacgggacccatgatgaatttttccatagccaggtgtttgttttccataggaggatgcacgacaatcctgggcaatatttccgcagacacggccgtgtcttccgccggagccatcggaggcctgggcgttctgacgattgccgtgaattacacgctgaatctgctcaaaaagaaggatgagcagttgatggcgaaggatgcccgcattgaagccctgatggaccgcctgattgacaaatgcccgaattgcgagctggcgaaagcagccaacaagtccctgctggatgatgaatgacggcaggcgtgggggactatctcccgtcagcgtccgtcatgcgggtgtaaacctcccgggttccgtccgtgttcagaatcagcgtgtttctgctgagactgtcaatggtggaggtagcggtgaagagggaggaattgccatttcccatgcttttccccgtcaggatcaggcggctgccgtccagctgccagccttggtagagaagcgtgtgcatgttgatggaaacggccctgccgtccggcaggagctgcattccctggacatgcccaggctgcccggggacgggctgggtccaggagccggagaggctggcgggagtgggctgcatggagcaggatgccgccagcaggaacagggccgggagaaagagggaaaatttcacggcgggggagttcagcgttgttcccggatgatttccgtgccgatgccgtccggagtgaaaatttccagcagcagggtgtggggaaggcgtccgtcaatgaagtgcactttgcgcacacccgcgttcagggcgtcaatggcggagtggattttaggtatcatgccgccggatacggtgccgtccttgataaggtcgagggcttccgtacgcgtgacggatttgatgagggtggagggatccgaagggtctttcataattccggggacatcggaaatatagatgagtttcaccggcttgagttccttggcaagggcggcggctgccaggtctgcgttcacattgagcggtttatgggtgcccagttcttttgccagcggagagacgatgggggtgatctggagttccagcgcttccgtgatgcgctccgtcaggcaaccgatgacgttgcccacttcaccgatatctatggggttgccctgttcatctttttcatggatgcgttccccaacgaagatttccgtgccgggaatgcctacgcccttgccgccgtagtcgcggaacatttgaaccagaccgggattgatggttccggaaagggtgcgttccacaatggaaatggcttccggagtcgtgacgcgaagcccgttgatgaaacgggcttccagccctgcctccgccatcgccttggaaatggctttgcctccgccgtggacaatcacggggttgaagcccaggacttccagcagaacgatgtcccgcatgagctttttgaccaggcgggcgtcatccatggcgctgccgccgaatttgatgaggaatgttttgtcccggtaggcctggaggtaggggagggcgccgacaatgacggaggcctgttcaatcaggcgggtgattttggagtccatgtcagtaatgaaacggtaggagttttaacggaaggagagggagattttgaggcaggacccgttcaaagcaggcgcctgcttctgaagtaaaccaggggcaggatgatggaaacgagcatgaccaccagggagatgtagtagccgtattcgttttccaggccgggcatgtgggcgaagttcatcccgtaaatgctggcaatcaatgtggggggcatgaagaccacggccgccacggtgaagattttaacgatttcgttctgttcgatgttgatgaggcccagaacggcgtccagcatgaagttgacgttgctggaaaggaagttggcgtattcggaaagggaagtgacgtcccggctcagaggacgtagcttgatgtacagcgtggagttggtgtcgtccaaggcctcttcgttgctggcgtacgtgagcaggcgcagaaggttgaccaggcagtcccgctggcgggtgagcaggtcgcccacgcggcccaggtcctggagcgtcaggcgcagggcactggagacgggcacccgcttgctggctttgccttcaggttcgtccctgcggaagatgtttttggaaaggcggtccagttccgcgccgaaacgttccagcacgtccgcctggcggtccacgatggtttccagcaggccggtgaaaacctggtcccggctgatttgcttctggcgcaggagctggtgggaaaaaacgcggaaggaataggagtccgaatggcggatggtgatgattttcgcccccatgaggacgaaggtgatttccgacagggagggggattccgtatccacgcggctgagaaccgtggtggtcatgaagcgcgctccgtcctccgtgtacagacggctggtggcctcaatctcccgcatttcgtcataggtcggcatttccagcccgcagaggcgttccacaaacttgatttccgccggttccggggtaaggaggtcaatccagaagacggaatccaagtgttgttccgccgcatccacctgggtggtgcgctcaatgccttccggggtttgacgatagagccggatcatgccgttgatttcggtggggggatggaacgatgccgtgcatgaggttgagtgacacccaacgcaggcatgatgccttgtttgttcagggaagggaagtaaaaagggtgacaaaaagaggcccggttcccaaggtgggaaccgggcctgccggaaaagggatgcgcgcctcttaggcgttttccttgacgaccaccttgagcgtggcttccacctggggatgcaccttgatgacgacttcgtgttcgccttcgctcttgatcggcttttcgagttcaatcgcccggcggtccacttccacgccctgagcggtcagggcatcgtgaatgttctggttggtgatggcgccgaacgccttgccgccctggcccacttcaagggtgaggtctacggtcagtccgctgatcttggcggccacttcctgagcggcgctgagttcttccgcttcgcgcttggcgcgggcggcctgaagattggcgatgaaacggcggttggaggctgttgcttcgtgggccagacccttggggatgaggtagttgcggccatagccagccttaacggtcaccaggtcggcttctgcgccgagcccttcaatttttgttgcgagaattacttccatcgttgccatggctaaaaagaaatggttatttgtgagcggttgaagtagtaagtattcgcccgaatgtcaagacaagagcgataaaaagggcgtttttttatgttttgggaggaaaaatcctcccggttgtcatgattggtgacattgcgcttgcttcacgcggcagtagtatgtagggaaaggaaccgcatttatcgcgttctctcccggaggggtggggttcgcccgcgggtacattacagatatttgatcttatggctattcagcgcgcattgatatccgtttccgacaagaccggcctggaggagtttgccaagggcctgcacgagtttggagtagagcttatttccactggcgggaccgccgctttcctgaaaggcctgggccttccggtgattgagatttccgactataccggagaaccggagttgtttgaagggcgcctgaagacgcttcatcccatggtgcacgggggcctgctgcaccgccgcgacaatgaggagcatgtgcgccaggctaaggaaaatggcatcaagcccatcgacctggtctgcgtgaatctgtatccttttgaagaaaccgtcgccaggcccggagtcacgctggaggaagctattgaaaaaatagatatcggcgggccgtccatgctccgttccgccgccaagaattacgcttccgtcacggtggtttcggatcccgcggattacgcgcgcattctggatgaaatgcagacccacaagggggatacgaccctgaagacccgtgaaaacctggcggtgaaggtgtttatgcgcacctccaattacgataacgccatcactaattatcttggccaccagagcgcggaaagcaccaagggcagcttctgcatctgcgctcccctgtatcaggaattgcgttacggggacaatccccaccaggaagccagcctgtacggcagcttcggggatattttccaccagcttcagggcaaggagctttcctatacgaacgtgctggacattgaaggggctgccgagctgattacacagttccgccgcccgacggtgggcattttgaagcacacgaatccctgcggcgtgggccaggacgacgaagacctgcgcaacgcatggcagaaggcttttgaaacggatacgcaggcccccttcggcggcgtgatcgtggtcaaccgcccgatgacggaaggcctggcccgtgtgctgagcgccattttcacggatgtcatcatcgctccggagtatgatgcggaagcccgcgccattctccagaagaagaaaaattgccgcatcatccgcatgaacacggaagcctggatgaaggcgcgccgctaacccatcatccgttccgcacccggcgggttcatgaccatgaagcgggatacggacgtgatggggctggacaatctggaagccaaggtggtgaccaagcgccccccgaccgaggaagaattgaccgccatgcgtttcaactggcgcgtcgtgaagcaggttcattccaacgccatcgtttttggcggtacggaccgcacgcttggcatcggcgccgggcagatgagccgtgtggattccgcccgcattgccgtctggaaggccgggcaggccggcctggatctgaagggcagcgttgtagcgtccgacgccatgttcccgtttgcagacggccttcaggtggcgattgatgccggagccaccgcctgcatccagcccggaggctccatccgcgacgaggaagtgattgccgccgctgacgccgcgggaattgccatggtatttacgggacaccgccatttcctccattaatttgaatgttcgtccccgcccctttgtcttaaaaccgatatgctgctaggtgtaaatatagaccacatcgccacgttgaggcaggcccgctacgcgaccatgctggattccttcaatgtggagccgagtgttttggacgccgcttatgcggcgcaaaggggcggggcggattccatcaccctccatgttcggggcgaccgccgccacatgcaggatgcggatgccctgagcgtccgggagagcgtggcccttcccctgaacctggaaatgggaaataccccggagatggtggattttgccctgcggctgaaaccggactatatctgcatggttccggagaagcgcgaggaaatcactacggaaggcggcttggacgccgtttttcatgaaaaggatctggctccaaccatggcaagaatggccgataacggcattcaggtgagcctgttcattgatccggaagtgccccaggtggaggctgccgcccgcctgggcgcccccatgattgagttgcataccggatgttttgccaaccattccggcagggagcgcacggaggaactggcccgtttgaaacgcgccgcggaactggcctattccctgggcattcaggtgaatgcgggccatggcatcaattaccagaatctggaacagctgctgtctggcgtcccttgcctgcatgagctgaacatcggccatacgattgtatcccgcgctctttttgtggggatggagcaggccgtgagggaaatgcgccaggcgatcgaccgcctgagctgattgcgccgtttcaattgatcccggttgccggagtatgagccgcattgcaggattgggaatggatttggcggatctggaacgcgtacgccaggccctgcggaaaaacggggaggcgtttgcgttgcgcatctgcacccctgatgagtgggcttattgccggaagcacgcggatcccgtgccgcatctggcggcgcgctttgcggctaaggaggccgtggcgaaagccctgggaacgggaatcggggcgaagtgcgcttttacggatgtggaggtggtgcgcggtgatgcgggagttccttccattcttttgcacggggctgcgggagtgaccgcccgggagctgggcattacgggctggctcctgaccatgacccattccgggttgagcgccgccgccaccgttattgccttggcgcaataaaaaagccgttccttgggaagaaaggaacggctggcattaaaggaggaaagggaagttattttctccttctgcgagcggcaaatcccgcgaacgcaagcagagacaatgccgctgtggagggttccggaacagcggcataagaaacggagagagaactcagtttcgtgccgttcaagccgtcattattccaaccgggagcacgatgtccaatgctgtacatctcgttttgggtatctcctccgtccgcggttccggtgtaccagtcgatatcgctgatagaaacggttgcggtgctggcggcagtaccattatcaagagtaacggttacgtcatgccccaggatatcaacggttacttttgtccacgtatttgccgtcagtccggcttctgcgattgctcctccggaggagaggttgccggagttgatggcaacagccccattgctgagtcccaggctgaagccgaatccgctacgggcaacgtgaatgatattctcaagggaattgttgcctccccatgagatgtccatggtgatgctcatggtcccctctccggaaagggctccgttcagcatttcccggaatacatttgtaccgcgttcgtcaaaggtggaaccggtaagaaccgtccccttctctgcatcttgggcagtattgaaattacctgtagcagttccccccatgacggcagccgcggaggaaaaatcccatgtataggtagctgtctccgccgcctgtgccgcaccacagaaaagcagccctgctgccagcggcaaatattttttaatggatagattgatagtcatatgacaatagcacgtaattgcaaaaacattcaacgattttcaaattcgttgaatgtttttctatcttaacccattaataaatagatttttaaaaatattcctattacaagattggtttctttttctgtttgtttattttcactgttccatacagaaaatgagaaaattatagatttttttcttgcaaaacggatttgaaattcgttgctacggaataaaagaggccgccctgttaaagggcggcctctgccttaagagttttttcttaagtcaggtgaacttttaagaaaagctcttgatgaggagctggcgctgttcttccagttcggccgggagcttcttgcccaccttgtcgaacagctcggtctggctttccagttcagcctgccattcgctcgggttgagagccatgttggcgttgaactgttcttcgctgtagtcgaggcccgtcttatccagttcggcataggtcggggagacgcccagcacggtcttctggccttcagccttgcccttggcgcggcgcagaatccagtcgagaacgcgcatgttgtcgccgtagcccggccagatgaagttgccgtccttgtccttgcggaaccagttcacgttgaagatcagcggaggattggcaacggttttgcccatgtccagccagtgctgccagtagtcgcccacatggtagccgatgaagggaagcatggccatcgggtcgcggcggacctgaccgatgttgccgaaggcggcggcggtcatttccgaacccatcgtcgcgccgacgtaaacgccgtgcgtccagtcgcgggactggaagacgaggggcatggtggtggcgcggcggccgccgaacaggatcgcggaaagggaaacgccttccgggttctgccattcgggatcaatcgtcgggcactgggaggcgggggcggtgaaacgggcgttcggatgagcgcacttgcgtccgcaatccggggtccagtcattgccctgccagtcgatggcgtgggcgggagcggggccgtccatgccttcccaccagacgtcgccgtcgtcggtcagaccgacgttggtgaagatgacgttttccttgatggtgtccatggcgatcgggttcgtcttgtaggacgtgccgggagccacgccgaagtagccgttttccgggttgatggcatggaaggtgccgtcttcatggggccagatccaggcgatgtcgtcaccgatgatggaggttttccagctggcttcccggtaggaggcggggggaacgagcatggccaggttggtcttgccgcaggcggacgggaatgcgccgccgacgtaggccttggtgccgtccggggattcaatgcccagaaggagcatgtgttcagccatccacttgttcttgcgggcgatggcggaggcgatgcgcagggccaggcactttttgccgagcagggcgttgccgccgtaaccggaaccgaaggaccagatttcttccgtttccgggaagtggcagatgtacttttcttcgttgcagggccacggcacgtcaacctggccgtccgcaagcggagcgcccacggtgtggaggcagggaacgaatgtcccgtaaccgtcacgcttcgggttgccgccgcccttgacttcgtcttccaggcgcttgagaacctgttcacccatcttggtcatgatgcgcatgttggtcacgacataaggagagtccgtgatttcaatgccgattttggccaggggggagtccagggggcccatgcagaagggaatcacgtacatggtacggcccttcatgcagccattgaagaggcccttcagtttggccttcatttcaacgggatcagcccagtggttggtcgggctggcgtcttcttccttctcgctgcagatgaacgtgcggtcttccacacgggctacatcggagggggtggaacgggcgaggaagcacccggggcgcttctcggggttcagtttgataaaggtgcccttttctaccatcatgttgcaaagctcgtcattttcttcctgagagccgttgcaccagtagatggagtcgggttggcaaagctgggcgatttcttcgacccacttcttagctgcttcgtgagtggtactcatggtgaagatagtgtatgcacggaaatagccgttggcaagcctcccgtgcggctttttatggggcggttttgtttctccgggcatgaaaaccgcatgcggggaaaggcgttgccctgattgccggatggctgtgcgcgggggctttcttcaggatatccctttttcctgctgccgtgtttcggaaagggtgaaaaagactgttttgactggaaatctgcttgccagctcgtctgcgatagtctagggaagaatcatgaatgttagaatgttgtcggcaaatgcggtgtttctgatgctgccggctttgctggcggcgtgttcggacgccccgcgcccgcccgccgtcagcttcaggattcagaatgtgcctcccgtgccgcgcacgatggcccagatgtccagagaggtgcacattaaccgtgatttcatgtccccgcgctcccgtgctcgccgggccgcccattccatgcatccgcggtttatcacgattcacagcacagccaatcccaagggtgacgccgcggcgcatgcccgggcattgaaaaggggggccatggggtccctgaactggcattttacggtggaccagtaccgtgccgtccagcatattccgctgaatgagacgggccgccacgcagaccggggcggccccggagacatgtactccatcggcattgagatgggggaggtaaggagccataaccccattgttacctggaaccgctccgccaagctgacggcagtgctgatgaagcagtaccatattccgctccgtaatgtggtaccccattattattggacggggaagaattgcccggccccgctgctgaccaacggccgtccgggacataaatggagctggttcatttcccgcgtggattattacaggcgctgtctggagacacggcccgccgcagcgctctgacgggtacgcgcacatggtgcatgataagggatacgttcttgggttcatggctggagaattgcttttaacgtcttctctggaggaatgcgtttttatccgccccagagagttggcggccatgcaggcggcgggaatggcctccgtacgggatttgttgttcatgcttccgcgcaggtatgaagaccgccgcatgtttgcccgctatgattccttgtcttccggtgtgcccgtctgcctgagagggagggtggtggatgtgggctggaaaggctggggcggacggggcggcaagggccgcggccggtatgtggaagccgtgctggcggatgagcagtctttggggcaggcccgtttttcctgcctgtggttcagcatgccgggcgtagccaggatgttgtgcgccgggcaggagatgattgtatacgggcgcatgaaaccgtatgggaaaaagctcagcatggtgcatccggattttgaaattatccgggaaggagatgagcagtccattcatttgaaccgcattgttcccgtgtatggcggccgcatggggattgcggaccgcaggctgcgggaaatcgtatgggagacgctgtccaggctttccccggctctggaaccggaggtgtatgagtttgtgccggacactccgtgcaaaacggcattgagggatcttcattttcctgagaccgcagaggcccgggaccgggcgcggcgccgttttgcgttggaggaatgccttgctcagcagttgaacgtggcctacagaagaaggcgggcggatgaagtgcccggcatgcggaccgcaggttccagccatttggtgaaggatctggcggattccctgccgtttgagctgacggaggctcagaagcgctgcgtgagggagatttaccgggatatgaaagccccccgttccatgaaccgcctgcttcagggggatgtcgggtccggaaagacgctggtggctctgtgcgccatgctgctggctgtggaacacggttattccgccgtgatgatggcgcccacgcagattctggcggaacagcattatttgaaattccggcagatgctggacaagctggatgtgcctgtttccctggtgacggcggacaggaaggaagaatcccatgtgtcgttcgggaagcagggcgggattgtggttggcacgcatgccctgctgtacgggaaaaatgtgccggagcgtgtggggctggtcgtgattgacgaacagcacaaattcggcgtgaatcagcgggagaagctgattgaccgggaagagcgccccgacgtgctggtgatgaccgctacccctatcccccgcacgctgacgctgactttttacggggagcttgacgtttccatcctggacggcgtgcccggggggcgcggggcggtcgtaacagccatccgtacggagaaggataagggaaaagtgctggcattcgttcggaaccagctggaggaagggaggcagatttacgtggtttcccccctgattgacggagaggattcccggaaggggaaagccgtgacgaaggaatgggacgagtggaaggctctgctgcctcatgtggatgtggggctgctgcacggcaggatgtcttcagaggaaaaagaggcggtgatgaaggatttccgctccaaccgcatcagcgtgctggtgtccaccacggtggtggaggtgggggtggatgttccgaatgccacggtgatgatcatcaataatgcggaaagtttcgggctttcccagcttcatcagctccgggggcgcatcggccgcgggtcgcacaagtcctactgcattttgatgacggacgcccgtccggaggatgagcaatgggagaagctgcgcatcgtggaaactacggcgaatggatttgacctggcggaacaggatttgaggctacgcggccctggagacgtgctgggtacgtcccagagcggcttgaagggcgtacgctttgaggaatggctgctggatgcgcgcctgattcaccgcgggcggcagctggcggaggctattctggcggaagatcccaatctggaatccgccaaataccgccctctccgttttttgctggaagacggggcggggaggcgtgtggccgggtaagattgtttttctgccatttgctgacggtcagcttgtaagaggcgcatgacagataagagggcaacgatttatccgccggaatgaatctaaagaagcaaagaagatgtttcttcttcaacccgaacaccgataaaacaatgattcaaacgtatcaagtactccctgtggtggccatcgtatgctccgcttccgcctttgcccagaacgctgccgatcccgtgcagatggtcaagcagaatatcgacctgatttcttccgccaacaaggttttggacgacgtgaaggacaacgctgcggttgaaatcgccattaagcagctcaatgcgttgacccagcaggccaagcagctggacaagtccatggaaaagatgaagcttacttccgagcaggctatccgcatcaccaaattgaacggagacgcccaggacaccatcgtggacatgctggaaaattgcgagcgcattcaaaaggacaagctgatgactccggctctgctcaaggcggtgaatgattttgccgatgccgccaacatcgacgtggtggaaacgattacgaccgtggagcaaattgtggaagattgagtgaccagcttatcaaaagacctttgactggtaaggccgcctcctgaagaaggcggccttattttttcaggaagggccgttttttatcaatttccgggcagggcattttatttctccatggccggattggggtttcttgccggaaccaggtagcccgtgccgggagacgtgcccaggcaggagaggagatcctggtggcgcggcagggacttggcgcggaaaacggctgcggcggggtccagcacattgccgaaggtgatggctcccatcgggcatgcgagctggcaggccgtttgagccgccccgtccggaagcagcatgtcctgggccgtcacatggatggaggtggatggctggcccggatgctccttcatcaagcggaatttgtgccggattttggcacgttccaccatttggacgcagtaggtgcatttttccatgacgccgcgggagcgaacggttacgttgggattgcgctgaaggcgcgtggcctgttccgatgctttggcgtaatcaaaaaaattgaagcgccgagccttgtacgggcagttggtggcgcagtaccgggtaccccagcaccgggcgtacaccatggcgttcaggccttccgcagtatgcacggtggcattgacggggcatacggattcgcatggggccctgccgcactgctggcaggccacggggatggaggtgagcgtcccttcctccgtgaagtatctgtcgatgcgtatccagtccagggcgcggcccctggccatctggtcacgccccaccacgggaatgttattttccgcgcggcaagcaatcatgcaggcgttgcagccgatgcaacgggacgtgtcaatggccattttccactggtaaacggcatccgcgccgggagggggaggcgggacgcgggacggaccgggatgcagggagaacggggcaggatgcacaacggggctctgaatggcttccgtccgctcccggagggcagacaaggcaatctgttccggggcaatgccgtatgcttccgttttttccacctgtctgcggagttcatatccgccggaattttcctgcctttccgctacgtggttgatgccgccataacccagaggaagaataatgagattatccgccactcccggaatggggcacaggatgacttccatttgcgtggagggggcggtaagcgtgcagtgcatgggcccggaatccgaacctcccagccgcagaaaggtggcgggggaaacctgtgcggacgccgcccagctgacgcctgttattgggtccgggcattcctgcatccatgcattgcgtttccagcggccgtccccaatggaatagtccgcgcggaattgcaattccagcatcccggttcccaattttttcccgtggccgccaaaaggcgctgcgggcgtttgcatcatggctgttccaagagccgtttcttcctgcggggacaggggagcataagccgtttcttccgaatagccgcgctgaagcgcctgagcccaggccgcagttttattttccggattcacggcgcgttcaaagcatttgcgcgctctgtggtaaacgggagagaggtgggtgggggaattgtccgccgtggagagatggcctttagaggaaagcaggccggaaagcacttcttccggagaaatgcccccgtacaggggaagaatgacgggctggcgatagcaaaatctgccccggtaatcccgctccactccccatgattccagaaagtgggctgtaagcaggtgccagcggcagacgcgggaggtttcatcttcatacattccaaggtggatgctttccaccctgttcagggcttccgacagtccggaactgtgcccggaatccagcacgggatttcccgcatccagtaaaaaaacgatttccacctttttcccccggatgtcccgaacaagatcgtccagcgtgccataacgggttgggcgcggagcctttagcaactggatgcatgttcccatggagccgagaagacagttgagcttccaggcgatgccggataattccggatgattgtcccccaggaggacaacgctttctccggggtggctgaataagtcatccgcacaatggcgaagccagttaagttccctttccgtcagagaatggtccgttcgccggggagggggaagcgtttgtccggagttttttttgctggaaagatagcggaacagttcctccaggaaaaacgccaggcgtgcgggaggaacgggcagcctgtggtcggcatgggccccagtcagggaaacgcgtccctccacggcgtaaaggcgtgttcggtttctgttttcttctttgtaataaagcccttccggggagcgggacgcaatgaagtcgcgcgtgtttccataggggttttgatgaagaaaatcgcaatccagggagaggatacgcctggcgcgcgcaaaacgcacgcggaaccgtacttcttccggcagccccgcctgcatgccggaacccggttcaggcacgggggaataccggtagatgcgcacgagtgaatttttcctggtgatttcctccagcatggaatggagcagaggggaagccgaagggggaaggagaaggccgatgccgccaccatcccgaagattgcgggaccaggaagaaaaggctccccggaattcgtcttcggaggccggattgccgttgaacaggacatgtttgctgcggccggggtcgtaaaggtccagaatggaggcctgagccgcagccggcagccccggaccttccgggtattgcagggagggaatcaatttgacggggcgcccttcataacaggcggccagtacgggttgcgcgtttcctcccatggtcaggcaggtggcgtaagccgtttccacgccgggaacagaccattcaggcccttcgttatagggaaccaggtatttttccacacggcggcaggccggcagccctatccctgccagggctgcccctgcacccatccatttcatgaaggaacgccgcgtcatcccccgttcttcttccggaagaaaagcggggtggttctggggaacttcattctgggaaaatggagggaggggagtcaaaccgggtaatgatggggattgatgaaacagggatggctttttttaggaaatccgaaggatgaaatcaagtggtgattgacggtagtctttatcttcgggccaataagggataaacagggaacaggaggggattttttttgtggaattcaatgtcattgattacggattcaaggaaggaatcatttaatgaaaagtcctttggtctttttattgcgcagtatccgggaacgcagggaggaataactttggcgccgcggatgtcaaacaggccatggaggtcagtgatggcatgcggtgcaatccgtcttcggctgaattttccattggcgtttcagaaaatttcccagttgaagcggggtttggatgcttttcccttcttcatcccggatggaatgcgtgcggaggtagtctgcggcggaataacgggaactggctgtttcctccagcgggcgcagatggggagccggattgcggtggcagtccagacaccattgcatgcgggcatcgcgtggagccctgatgcgttccatgcccgccacgtctccatggcaggacgtgcagccgatgccccggttcagatgggccatgtggttaaaataggcgtgaccggacaggcggttgaccatcacccagcggaccggttctcctgtgtaaccggggtattgcgggtccgccgcctccctcaggggggcgatgagcgggctgtccggaagaatatgctggtggcagcccagacaggacttcgtatccggaatgccggctctggatgagcgctgtgcggcgctatggcaagccgtgcagctcatcttcagatctccggcgtgaagtttgtgggaaaagcggacgggctgcacgggttcatactccggaatgctgaaattaacataatatattccccccagtacgaacgcggcagcgagcgcaaccagggcggcaatcccgtaaaagcgcttgttggtattggatggaaagatgttggccatgaaccgtggagagaaagggatggagcctccgtcaggccgttctgcccgggcgcgggatgcgggcgggcggcaggggcgtatccatcgtcaggtcttcaggcaccagccgtgcggtgcttttcttaatctgttcccaggtaatgcgctggcctgtgtgggccgcttcacgccccatgatggcagccagggttttattggctgcgctttccagtgtctgggtccaggtgccggagcgcaggaaacggtaaaaggccacatgcgtgtctgcgtacatattgccgcgttccccgcggaaacgccagcggttattcgcctgaatataggggcggtagggagtaaccagcattcctttttcgcagatggtgcggtccacgatttccccgtggcagccaacccactgtctgcatgaaatgtgggccgttacgttgtggccgtactcaaaataaacgtcgtaatgatcccatacgtcgccgtcatcccggcgctgggcgcgtcctccggagccgaaagccgccagaggaagctgctcgttcatggaccagaccatgccgtcaatcgtatggacgatttgttccacaaactggcctccgctcagccagttccatgcggtccagttgcgtagcgcccatgccacgtccgtatcggaggaaggtcgggaatccagggccagcggagacttgggaggagtggtgtaatataacccgtcaaaggagaggacacgtcccagctgcccggaggaaagcttgcggtgggcttcctcattcgccttgtcgtaacgccagcagaagccgtccagaatcaccagatttttgagttttgccagccgtgcggattccagtacggaaagcacgccgggaacgtccaccgccacgggtttttccgcataaatatgtttgctggcgtcaatggccgccgccaaatgttccggacggaaagcggggggagtgcagagcagaactacgtcaatatccgtttgcagcagtctcttgtaactgtccaggccgctgaacaggcggctcctgtccagccgggctcggttgccgtactgttccgccagcaatttggcgccgaaatcgatacgttcctgaaacacgtctgccaatgcccaggcaattgttccgggatcggcgtccagagcgtttttcatggcgcccaggcctcggcctccacagcctaccaggcccaccttgagcggttttgcgttcgtcagggcctcttctgcgttcaggcagggcatgacggcaaggaatccggctgttcctgcggcggttttcagaaaacggcgtctgttccaaatagggtaacccatctcaggggaattatacggtgacgtcctgtgaaatcaaacgtcgtattgaaatggtgacacaaaaaataggcgcaaccgtcattctcggaaatggtgccttgcggagggagtcaatgaactccctatattttgcctattaaatgggaagggctgtttcctgcgttcagaacgagaggcagaggttaaagagatatgttgcctgaaaaacagtttttaaggataaaaactgatttgactccggaatcttcagtgttcatgatgaattcaatgaggcctccggcttttcaaccaatcatcatgatgaagcgaaatctcattccttctacggcttttttggcggcgttagtgtttgttgcctgtgacggcggcaagaagcaggatcatccccgggatgtttcggttcccagcgaacaggccgttcctaaaactccgggagaaaaaattctggccgttctgctgcttattcaggatcaggctacggcaaacgcccacgcggcggaggtgaaagagctggctgcctccctgcccggggatattcccaatgaagaagccgtaaatattgcaaatgaattgatgcgtctggccagccgggaatgttatggttcttcgtctctggaagatgctttgaaaggaattcatttcgataccggggaatacacgggcagtgtgcctctggatgtggatggattcgaacctaccgcggaagagccgtaaaaataaattccccgtgccgggaattgggtaattactacaatgttcctcttcattccgttttgccggaatgaagggcggtttgatatggtatcaggtcccccggtaaatcctttcctcttcctgatgggaaaatgcgcgaagagaaggggaaaatatctgtacagcccgactcccggagtttttttgctagagaacaaagggccacaggtggtaaactcaatccagggggcggcgcaattcttcaatggcttccgccatatcttcccgggtaatgttcgtagaaatgcctgcctcccctgctttggaaagcagaacaaagcggatggttccggcccggaactttttgtctgatgccgttttttgaagaacagttgccgtatcaatgccgttcggaagagccaagggaagttccagcgcctgaagcgtgcgaaggatcttgttggcatcggacgaacttaaaccggctttccgttcactcagaaacagggcggcgcgcatgccgagcgccactgcttccccgtgcaggatggttccgtaagggacggcagcttcaatgccgtggccgatggtgtggccgaaattgagcagagcccggatatccagagtttccaattcatcattttctacaatgcgggccttaatggccacgttccgggagattaggtcaggaagcctggcaatagtattcagggagaagccgatggagagttccggccccagccctttcaattcatgaagcatggaagcgtctttgatagctgcgtgcttgacggcttccgccaaaccttccgccagcgtacgtcgatccaaagtcaccagcgtggtagggtcgattaccacgacggacggctgatgaaaggctcctacaagatttttcccttctggaatattgacggcagtctttcctcctacggaactgtccacctgggcgaccaccgttgttggaatttgcatgaaggggatgccccggtaataaatggaagcgatgaagcttaccagatcccctactacgccgccgcccagagcggcgatgcatccggtgcggtcaagcccggcccggaccagttcggaacacagctcctgggcctgaagcatatttttggaagcttccccggcattcactacgtgcagactgggcatgaatcccgcgctctccagggacttcattacgcgctctgcataaagtggggcgacacagctgtccgtgataaccgcaatcttgccgtccagaccggcgcggtaggcaaactctccggtacggtccagtgctccgttttccacgtggatgtcgtaggaacgttcaccgagagcaagagaaatggtaggcatgaggccagtatgggatattccggagggaacctcaaacggaaagtgcggatgaggcgaagaagacgcattccccttttaatgcgttcttgtcctgggtgccagcggagaaagagtttccaggataactttcaaatgctccgcgcgtgaggccgtgaaaccgccgtcatccttccagatgatattgccgttgccgtccagaaggacaatcgctgtttccgccttcttgtgaagggaaagcctgcggcgtacaaaagactggtcataataggaaatcagggaattggtcttcatgtaaaaatccggaaaatcccccagagcctgtgtaaaggcggggacatcaccttcaatggggggtggctgcagaaccagcaaaatgctatattccaccggggttggcgtatgtttgtactgtttgcggaggtcctcgcagaagggaagccactttttcattccgtacaaagtttccgggtgaaaaacagtcagcatgatatggaaactttttggaacgataggaggcagggaaatattgtctcccagtaaattcatgccgttgatatccggaaaacggtaacgtccgtttcctcctccataaggatgctcgggattgggcgttggcaagtgtatttcctgattcttcatgccctgttagacaaaattcgaagaaataatgttcatgccgatggttgccgaacagggtatgttcattggtgcggggaagggccttttttctgttgaaaggttctctttctctgagaattccggccgattagaaaatcggtattcatggaaaaaggaatatataggcctgttataggtttttctcgaagaaaggtagggtacaagagtagggaagagagggacgttcaaaaaaagatgcggaggaaagaggcagtatgacaaaagcatatactgttcatgatatgtaggttatgtgagtattgggaggatggcgggaataagcggacgcaaaaaacagcacgaaaaaaattgacaaaaaggtgtggtatgatagatttctcggcacgccaacacggcgacgggatgaaaagcccggcggctgaagggctcggaagagtgctggaagcggctggagctagccacccggagaaaaccccggaaggggttgcgataagaagatttcaagggaatgactaccgaaaccgccgagggttttccgagggtgccgagaggtgtctgaggggtaaaagcccgaaggagcgacctagctctgagaggggtggtttggtagaagcaaggggaaagaaaaaaggtcgtgacgcgcgccgtgcgaggcagagcgaagaggtcttcaagagacacaacttgaaggaagagctggctgaagcatggcgcaaatgaaatcgcaagattccatttggtccagcaatttcaaaaattaatttgatggagagtttgattctggctcagaacgaacgctggcggcgtggataagacatgcaagtcgaacgagagaattgctagcttgctaataattctctagtggcgcacgggtgagtaacacgtgagtaacctgcccccgagagcgggatagccctgggaaactgggattaataccgcatagtatcgaaagattaaagcagcaatgcgcttggggatgggctcgcggcctattagttagttggtgaggtaacggctcaccaaggcgatgacgggtagccggtctgagaggatgtccggccacactggaactgagacacggtccagacacctacgggtggcagcagtcgagaatcattcacaatgggggaaaccctgatggtgcgacgccgcgtgggggaatgaaggtcttcggattgtaaacccctgtcatgtgggagcaaattaaaaagatagtaccacaagaggaagagacggctaactctgtgccagcagccgcggtaatacagaggtctcaagcgttgttcggaatcactgggcgtaaagcgtgcgtaggctgtttcgtaagtcgtgtgtgaaaggcgcgggctcaacccgcggacggcacatgatactgcgagactagagtaatggagggggaaccggaattctcggtgtagcagtgaaatgcgtagatatcgagaggaacactcgtggcgaaggcgggttcctggacattaactgacgctgaggcacgaaggccaggggagcgaaagggattagatacccctgtagtcctggcagtaaacggtgcacgcttggtgtgcggggaatcgaccccctgcgtgccggagctaacgcgttaagcgtgccgcctggggagtacggtcgcaagattaaaactcaaagaaattgacggggacccgcacaagcggtggagtatgtggcttaattcgatgcaacgcgaagaaccttacctgggcttgacatgtaatgaacaacatgtgaaagcatgcgactcttcggaggcgttacacaggtgctgcatggccgtcgtcagctcgtgtcgtgagatgtttggttaagtccagcaacgagcgcaacccctgttgccagttaccagcacgtgaaggtggggactctggcgagactgcccagatcaactgggaggaaggtggggacgacgtcaggtcagtatggcccttatgcccagggctgcacacgtactacaatgcccagtacagagggggccgaagccgcgaggcggaggaaatcctaaaaactgggcccagttcggactgtaggctgcaacccgcctacacgaagccggaatcgctagtaatggcgcatcagctacggcgccgtgaatacgttcccgggtcttgtacacaccgcccgtcacatcatggaagccggtcgcacccgaagtatctgaagccaaccgcaaggaggcagggtcctaaggtgagactggtaactgggatgaagtcgtaacaaggtagccgtaggggaacctgcggctggatcacctcctttctatggagcaagtgcacggaagtgcacaggtcggatctcttcccgaggggagagaaagcggaacccgcgagggcccgcaacgaaccaaagatgtgtaaacagccagacgcctagagcgaaacctggcacgacgtgcgtgacgaccttttttcaccgagaaccgcaactgggggtatagctcagttggtagagcgccagctttgcaagctggatgtccggggttcgagtccccgtgcctccaccagtttcgggaaagagacccaaagccgggcctgtagctcagttggttagagcacgcgcttgataagcgcggggtcacaggttcaagtcctgtcaggcccaccagcaaaatcgattattgagggaaagcgaaaattgacatctgcgtggcaaagaaaacgattgctgagaagcaatcgctttccaacaaagtgggtagttgaacaacaactacaaaacacaagataaacatgcataccaagcaatgagacaatacagtaagtcacgaaagggctttgtggtattgtggaagtggtaacagcttttgcaatatgatgaagtaagtaagggcgtacggtgaatgccttggtgccaacaggcgaagaaggacgcggcaagctgcgaaaagcctcgggaagctgcaagcaagcgatgatccggggatatccgaatggggtaacctgatcgaggcaatactcgatcgttcatacctgaatacatagggtatgaaacgcgaaacccgctgaagtgaaacatctcagtaagcggaggaaaagaaagagaaatcgattccgtaagtagtggcgagcgaaagcggatggagcccaaaccgaaggtattccttcggggttgtaggaccacgtcatattcgaccatactggatagtagaacagcctggaaaggctggccggagaaggtgaaagccctgtagacgaaatccagagtgggaattagtggtatcctgagtaatacatcacacgtggaacgatgtatgaacccgcgcggaccaccgcgcaaggctaaatactagttggcgaccgatagtgaacaagtaccgcgagggaaaggtgaaaagaaccgctgtgagcggagtgaaatagaacctgaaaccgtatgtctacaaagtgtcagagcagagcaatctgcgatggcgtgccttttgtttaatgagtctgcgagtcagtgtttgtggcaagactaagggcttccggcccggagtcgcagcgaaagcaagtccgaacagggcgcaataagtcgcaggtactggacccgaagcggaggtgacctacccttggccaggttgaagcatgggtaaaaccatgtggaggaccgaacaggtgaacgttgaaaagttctctgatgagctgagggtaggagtgaaaggctaatcaaaccccgtgatagctggttctcttcgaaatgcatttaggtgcagcgtcacgtgctgatgcgcgggggtagagcactgacaaggctagggggcacacccgcttaccaaaccttatcaaactccgaataccgtgcaatggaacgtggcagtgagacagtgggggataagcttcattgtcgagagggaaacaacccagaccagcagctaaggtgcctaaataacgctcagtggaaaggatgtgggattacacagacagtgaggatgttggcttagaagcagccaccatttaaaaaatgcgtaatagcttactcatcgagtgatcctgcgccgaaaatgattggcgatcaagcgttataccgaagctctggactttgccgcaaggcagagtggtagaagagcgttgcatgcgcgtcgaagggcgatggcgactgaccctggagcacatgcaagtgagtatgcagacatgagtaacgttaagccgggtgaaatccccggccgccgtaaacccgaggtttccagggcaacgtgtttcgtccctgggttagccgggacctaagccgaggccgagaggcgtaggcgatggacatcaggttaataatcctgagctcgcaacccttaaactggggggacgcatgagaaaagatgactaggttattgaattccgagttgagtccacggactcagcgcatcattggatcgagtgccaagaaaagccccagcgtatgctaagcgacccgtaccgcaaaccgacacaggtgggtgggtagaatataccaaggcgtaagagtgaaacctggttaaggaactcggcaaattagccccgtaacttcggaagaaggggtgcctgcagcgatgcaggccgcagagaaatggcccaaccgactgtttatcaaaaacacagcactctgcaaagacgcaagtcgaagtatagggtgtgacacgtgaccaatgccgaaagattaaggcaaggggttagccgcaaggcgaagctctaaacccaagtcccggtgaatgtcggccgtaactataacggtcctaaggtagcgaaattccttgtcgggtaagttccgacctgcacgaatcgtgaaacgagttgggcactgtctcaaccaggcgctcagtgaaattgtagtggcggtgaagatgccgcctacccgcagaaggacggaaagaccctatagaccttaactgtaagctgtcattgtttcttcggttttaatgctcagagtaagtgggagacgctgaagacgccctttagggggcgtccgagtcatcaatgagacaccaccctttgaaactggaggatctaaccctgagccgtgaatccggccagaggaccgtgtcagccggtcagttttactggggcggtatcctcccaaagagtaacggaggagcgcgaaggtgggctcagcccggttggcaaccgggtgtcgagtgcatgggcataagcccgcctaactgtgagaccaacaagtcgagcagatgcgaaagcaggcccaagtgatccggcggtagaaagtggaattgccgtcgctcaacggataaaaggtaccttagggataacaggctgatcacgcccaagagttcatatcgacggcgtggtttggcacctcgatgtcggctcgtcgcatcctggggctggagaaggtcccaagggtccggctgttcgccggttaaagcggcacgcgagctgggttcagaacgtcgcgagacagttcggtcctctatcctctgtgggcgttggaaaattgaggggttcagaccttagtacgagaggaccgggtctgacgcaccactggtgcatcggttgtactgtcaagtgcatggccgagtagctaagtgcggacgggataagcgctgaaagcatctaagcgccaagcccttcccaagatgagttttccctacaggttcgtggaagaccaccacgttgataggtcgcaggtgtaagtgcagcaatgtattgagccgagcgatactaattaccaattgacttcatcatattacatcactccccgtcgtgaatgacaacttgctcttgtctcatttacctgtgcatgttcatcaaccaccagccacgcagatgtcagtttacgctgaatccctccccacacaaaggacggaaatcttcttagccgccacacacataccctgaaaaaaatccctcactcagaagcccccaaaaaagcagggctcccgggcaggcaggatgaagaaaaaatcacctcttccccctgaagcccggtggccagagcgcagtggtcccacccggtcccgttccgaacccggaagtgaaacgctgccgcgccaatggtagtcggacgataggtcccgcaagagtaggtcgccgccgggatttttttccatcaggccccgccagtcatttgactcgcggggcctgttcttttcttgctcggtcccgttctccccccccctacattctcttagttagtttccttcttgtaagatgtcgtatttcttgtatgtattagtgttactatgttttctcatgcttttgccgccggggcgcttcttggaactgccatttcttcgcttgtttgcgtatctgccgcagaaagatcgcctgtggcggcggctgaagatgtagtggcgcgtgtaactccctcggcaaagggttctgtcttgttccacttaaatccggatcagggtaacaagatcactatttccggtattgccggaggtatccgggtggaggcgtcagatgtgcgccgcttggtggcggggtatggatggtatttaaagaatatagccaaggtccatttttcgtggaacggaaatcggataacgcttccttcccctttgccggttcccgccagtccggttacggtagaaagcccgtggaatatcgtttttgcctataattactgcaccctttcttatacggcggctttttgggattggaacagatggcagcgggagattgattttctggcgttgaatgggtttacgcatgcgctggtaacggcgggtttggaaaagacatgggaagattttctgacaggcttggggtatccccgggaaaaagctcttcgttttatccctaatccggcatttgccgcgtggtggaatatgggaaatctggaaggccacggtggtccgctgagccagcaacagataaataaaatggcccagatgggaaggcgcattgtctcccgtatggaacagttggggatgacacctgtacttcaggggtatgtgggatttgttccttctgactttcaggaaaatgttcggatagacggattgaagcttattcctcagggggaatgggttaatttcaggaggccgtgggtggtggatcccacttgcgaggcttttcccaaactggccgcggactggtacaaggctctccgcaaggtatacggtattcccggaaagatgtttggcggggatttgtttcatgagggggggcggaagggggatattgacgtaacgcaggcggcacaggcagtgcagaaagccatgcaaaaggcttctccgggggctttctgggtgattcaggcctggggtggaaatcctactcgagagttgttgtccgggttggatccggagcgtgcgcttgtattgcagcttaccaaggatatggctaacgggggaaagaatttaaggacttttaatggtattccgtgggtctggtgcgaactggcgaactttggaggcaatacgggaatgtacgggggggttccccttctgtcccggctcggaagtgagttgtccggttataaggataagggactggtgggcatgggaactttgtccgaagggcttgagacgaaccccctgcattacgccctgttcagcgaccgtttgtggactagggaggatatttctgtccgggagtggcttggaaagtacgcgcgccagcgttacggtttcgcgccaaaggctgtcgtgaaggcgttggaagttctgtcttcctccatctataaccccgttcgttctcaggaagggtgtacggagtctattatttgcgcccgcccgtcctggaatgttcgaaaggcatccacatggtccagtggggagcgatattatcacctgggcgatattgtaaaggcggcgcgcggttatctgaaggccgcgaatgatcagccgaatttggtgaaaaaggagacgtttcgttatgatttggtggatgttgttcgtcaggctcttgcggacgctgctttttaccagcttcaacaggtcaggagtgcttttgattccggagatttggccgcgtacaggaaacaggtaaagcgtttcctgtctctgatttcagatatggatgcccttttggcgacggatagccagttcctattaggaacttggcagaaaagggctttggattggggtgattcccggcaggaaaaagccttgatggacaagtctgcgaagatgcttatcactacgtggattgatcaggttccccggtctctgaatgattattccaatcgtcagtgggccgggcttgtttccgatttttatttgcctcggtggaagaatttttttgaatttcagatggatgtcctgaccggaaagaagacgcgtgatgccgcccatgccgcatttatggataagatggttcgggatgaactggcctttgccggaaatgggaaaatatattctgccaaaccggcgggggatactttggccgttgctaatcgtgtgatgaatacccaccgggaaatgttggacgccctgagtgcggaagaaaagcattcctcgggcagtccatgggaactccagcaaggttctccgttgcagtttgatgtgacggatcaggtgactgcttctggcacatatactgctactttccagtggaagaatggccccagcgccttgaaaatccattctgtcagattatacgagggtaacagggaggtggcttccgatgttcatgagggcagaactggcgtggaaaataaggataatatttacagactggaattgaagaagtacagaaccaaccttgattcctatatcctgaaggcagaagtaagcggtgtttctcagggagcttccaaaggagaaatggtgttgaaaaaactggtgaattgagaagtggacaggaagttgtgcagggatgggagaaaaggcggttatatgtgcaggctcttccatttgttccggaatcagtttgtttccctcgccggaaaaaggaagaagggggatttccccctttcttccttgaaagatggcatggtgataaaatttatcggcggtggcgtaacaatagagcgctaagaccgaacagaccccgcgtagcggttgccggttccggaaccacttcattacttgtggagaagtttactgccgacaaatacatgccctcccaagagttcaggatattgtttttataggtgccagttctgcagccgctatgcatgtccagagaaaggctgtttaaataaacggttttgggaagtgttgcttccttcctattcgtggcggcggacataacagaagaagacgattggacgattgggtcgcagaaccaaagtagttgttacctgcgttgttggcggtgttagtgttcgtggtggagaatatggtggctgcttgggcggttcccaacgataaaaaaatggagataacagaaataatgggtttcatttttgggatggaaatataacttgatacattggtatgcaccgggaaaaaatctatcggatttctaatcttttttgaaaaacatgaaatatattgatgttataaagaaatattcaatttatttaaaattttagatggaaaacgattagtaatagtcttttttgtctcattatcggtattatccgagaaaaaaatcatgacccaacggtaaataccggttctagattttccttactccggcacatagccaaaattccgtcctcagaaaactcctgcttcccgaagcggaatggtcagcctacacaagctattctcttttaaaagtaaatatggacctcggattcgcaacccgtttgtcgatattcttattgtactgccccaatttatgctccggttccaaaagatgagctgtacaggatcttttgtagagatggattttttttgaatatagccttttcgttcagagggctgcctggtaaatactgaacatcagaatggccattcccgtgagggctgcgcctgcaatgatgccggaggcggtggggactttatattcccgtgatttggccttgaaaagatggtccgcagcccagccgagcacagctcctgtaaagaaaaggaaggagtcgttccactggatggcccaggccaggccgaagccgatgggggtggggagccattttcctgtccggggaatatagcggggaataagcaccagaatgagtccgagaataccgcctgcaatgatggaaagcaccttgatgctgtgcaaatggctgaaccccatgcctagtgcttccgccgtggccgcccatgttctggctcccggagcattgaaagcctggagagcgttcgcatccggaaccatggagcggaaggccagcacggagacgagggttcccagaaaaattccggaaaactgggcgatgaattgtttgcgggggttagctcccagcaggtagcctactttgaggtctacgagcaggtctgccgaggaactggacgctcctgaagtgatattggccgccatcaggttggctgttacgtgcccgggtgcaatccctccgaagatgagctgtgtaacttttcccatggctccggtgggtgtaatattggcttctccggtgattcggcagacgaccagcgccaggaaaaaggatatgactaccgcgatgcagctcatccagtacggaacgttaaaggaggtatgagccagatagccgagagctcccaaagagataagctggcctgccagaaaccagctcatgggcgtttctattttttccacatctgtcagttttcgttttttactcagggaaaacatagctcccagggaagaaaaggaacgaacaatgcttttccattggaacaggaaagccacaatgctggcgacgaccatgcaggcagttcctccccacagggtccagcttacgctctcccgataacctgctcccgcaggaagcaatttctggctttccagccacggaacgtaaagagcccagcaaacggttcctccgatgaagagactgagggatgttttcatgcctaccagagctcccgcacccacgaacatgagatcccatttgaagaagatagtacgctggtaccagttgccgaggatatgttgctggaccgttccaagccatcgttctcctcctgcagccatggcgatggcattagcggcggcgaaaagggcagaataaagaagagctttggcctgtcccgccgcctttttgccttcagaatagagaactttgagggtttccgccgtagcaatactgtctgggaaccttatttgttcaatgttgatcatctggcgtttcatcggaatggccatggtgacacccagtacggcaatgaaaaatatccaggcgaaggtagtgccaagaggcatgtgctgtcctgtcagcaggagcagggcggctacggcggaggtgagggttccccctgtagaatagcctgcagaactggcagcggactgcatgcatgtattttccagaatagtcatgggggatttggaaatgcccaggcgcacaaaggcgttccagagggcaaaagagataattcctgccgtcagagccaccccaaaggaccatcccattttgaggttggcgtacagattagtgagggaaaggatggagcctaggagcatgcctatgatgacggctctccaggtaagttgcttcattctgtctccggaacccagataaacttgatcgtaccattgctgttctacttcatccggagtgccttggaatccatccagaggcagcggtttttccaagcaggaggggagagggctggaagattggggggacgtagatgccatacagttcataatatagcatttgcgggcgtggtggaaaagtcgtatctgtctttctctgctttcggcgttccttctgcttgagacttgcgtgcttgtgacggccgtggtttaatgggcggcatgagccaatcttttacggataaacttgccgcccgcattaaagagaccggttccgccttgtgtgtcggattggatccgcgccccggcatggatgatttggaggtgattcctgcgctgttgcggaaggttgtggaggaaaccgctccatatgcggcggcgtttaagccgaatattgcctattttgaagctatggggttgcgcggcctggaaatacttgaggatttgcttccggatatgcctaaggatgttccggtggtactggatgctaagcgtggagatattggagagactcagaagtattacgctcatgcttactttgaacgcctgggtgtggacgctgtgacgttgagtccttttatgggatatgatacgctggagccttttctgaattatgaaggtaaaggtgtttatctgctggcagttacttccaatcccggttctgcggatgtggaacggcaggaactggcagggggccgcagggtttttgaactggtgggagacatggtgctccgctctgtgcgggaaggctgtaaaacttccgtaggcatggtggttggtttgaccaatgcagattccagtattctggagcgtattccggatgctcctttgctcattcccggcctgggtgctcaaggcggtgatctttcctgcctgagtggttccggtcacgtggcgcctcccctgattaatgtctctcgaggaatcatgtaccagaatccggaattgggttttgctgagaaggccgccggatttgctcagcgcattcgagaggcattgaattattgatgttcatgtatttttttgcaaataacaaaatgataacggcctgcttatggctgtgcatgagcttgtcaaagggagggggctgatatattgaacaggtgcatccccattccctgcccgttttttatggatgaaaagcccggaattgtaaaattcactccccattccacttccagatccgcaatgttgattgcggtggcagtgacggtgggagttcaggtggctttgtgtgctgtgcttgtagccatacatttgcaggatatgtggtttccctccgtccagggtggggaagtggaaatgacgtttgtgtccccgtccgaagaagtttctcaggagatggaagaagttcagcctacatctgttgttccggttgcagctccttccacagtcagccctgttccggagattgcgtcagatgaagacttattggcgatgaagttgccggaaaatgaagattgttccgaaatgaaggattttcttttggatgaagctccttccgaactcttgccggaggagctcgccgtcatgcggatttccatgaatgaagtaaagcgcaggcagcctgtgaagcgcccggcggtatccctgtcggggcgtccggaaccggatcagaatatttctcctgataaaaaggtgcgttataaatatgctccgtccttgcccaattccgtcaattcttctaaagtcgggaaggtgaatgccgtggtgaaagtagtggttggagtaaattcccatggggaaccttcatccgtcaatcttcttcagtcaacgggaaatgcggaattggaccgcctttttatgcgttgggtgagagagaattggactttttatccggcggaaaaggacggtgtgcccattgcttccaaggtggtggtgcccgtcaggctgaatatagattaacctgtacaaggaaatataaagatgcttccggagaagacagagaataggcccgtttatgtgatcggccaccagaatccggatacggatgctatttgttcagccatagggaatgcggagtttttaagaactcatggcgaacctggcgcggttgccgccagatgtggggaaatgacgctgagaacatcctgggtattggaaaaggcaggagtgccggagccgatactgattcatgacgtgacgcccaccgccgggacaatctgtcgtcgtgatgtgattagcgtaagtccggacgatacattcctgacggcgtatcgaaggatgacggaaaattcccttcaaaccataccggttattgacgctgattacaaccttcatggcctattgcgttattttgatttgttgagcctgctcatgcctctgaatatgacggagatgaatgtgcgctccgtcttttccagcctgagcaatatcgccaccaccattgacggaaaatgtctgactggggaatccttaagtgaagaagaaacgcagaatattctgctggtgggtgcttccagtgaacccagcgttcgaacaaggctcgcaaattacaggagaaaagggattgtccgggatctgattgttatttgtggggaccgtccgaatgtgcagctatatgcagtagaacatggcgtacgcgctttggtgaccacgtccggtgctttcccttccttggacattattgagacggcccagacgacgggaacatgtattttgagtactccctgggatacggccagtgttggccagttgatccgttgttcccggaaggtgagggagcaggttcagaaggattacaccgtttttccggagaatatgccgttgcccgagttgaggcaggctgccgtaaagcgcaagcaggcattgttccctgtgatgaatatcaagacgaacaaaataattggtgtactgagtaagacggatttggtggatccgccccgtacacgtgtggctttagtggatcacaatgaattttctcaggccgtcaagggggtggaggaggcggagattgtggaggtgatggatcaccaccgtttgggtacccagctttctacacgggatccaatccgttttctgaatgaacccgtaggatccacatccaccttggtggcacgcagattttaccatcgtaatgtggaaccctcccaggctgtagcggtctgcctgtgcgcggggattctttcagataccctgaatttgacatctcctacggcggttcgggcagatagggaaatgttggaatggctgacaggtattgccaaaatagatgccaagaagtttacagaggagttttttgctaccggttctctgttgcgttccaaaactgaaccttccgttattattcaggcggacaggaagacttttactgagtacgggcataagatcagtatttcccagattgaggaaattggtatgtttggcttggaagatgttcaggaaggtttagtgagggaacttcggaatctggtggagaaagaggggctgaagcttgcttgccttttggttacggatatcgttactcacgattccatgttgctggccgtcggggatgaagaagctttggaaaatatcgagtacgagcggcttggccctaatttgttttccgctactgatgtggtaagccgaaagaaacagctttttcctgctatctcccgtgcattaaagacgttgtagatgccggaaatctttgctttttacaggcatttttcctgaggaggaacggcgttgccgtgcagtaaaaggtatagatcagggaattgcaatgtctgctacgatagaacggcggatagtatccggtatcagcacagtactggctctttcaggtttgagcggcggcgtgcaaaaaactcggtctaggcgtaatagagggaaattgacaggttgcgtagctccgtaaccggcacctttcagtttgaaacaatcctgaaagtcggaactgagtttggagaaaatgggggattgaggggcggcgctgaagttcccggccatgataatgggaagttctccatgctgggttcctacttccctcagggtatcaaacaggtattgaagttgtttacggtggataaagcggagtgtatggaaatatttccagcaggcgggggagtacaggtcgaagcgatgttcaaaaggttccagactgatgttgatgagccgaatcgccaaggaggaattttccggtatccagtctacaatcaaaccggctgtgtccgtgatgctctgggctggaccaatctgaccgtgccttacaatgatcgcgcaacttcctatttgcttgatataagaggttctaccgaaaatgctgtaggcaaatttgagtgttcggttatagttgctgcagccttggacgaaaatgacatctgcacggagtttggatatttgttcaatgggagggggtcctcgcagccctcgtacaaggtaagaacccttatttgcctggcatccggagatggcggcattttgtagtattccattccagttctggcaatgggcgggagaaagtctgtaatgacgatgccgtacgcaacccagacgataatgccaagcagaccgatccgggaaccgaagaccagccatgcaatgagcgccggaaaggagaaaatgagacagcaagcccatatgggcagtgacgttgcaaaagccatcgtgtctgaaccggtccagaaaatagtgacgacgatgacccacaggcacagagagacgccacccagcgctattcccaagtggttgactccggataacgttggcagaggttctgccagatgtttgcgtcttctgagccgatgcactgtggtgacagattagaagcccatgcctggagggagatccaggcctcctgtcagctttttcatttccgccgcggctgtttccttacccttggcaatagctgcattgatggtttgaaggagaagctcctggagaaattctgaatcggacgggtcaatgatggaaggatcaatgaccagttccgtgaggttgccgtcacaggtggcggtaactttcaattttcctccagctccttccgttgtaacggtttgggaggcgagtttttcttgagcggccgcaagccctgcctgcatttgctggacctgtttcatcattttcattatgttcatggtcgttgtgtctgggtggatgagttgactattgggaaatgatacgagcccggaaaatctccatagcagcatcaatcagcggatccgtgtagtaagagttatcttcattttcctctttggaagcttcctggacaggctctgcggtttttttctgcggggtatgaggtttaggtgcaggaatggtggatgcggaaggaggtggtgcaggcagaggagccagttcttcctgcacgggttcgggaatggagaaatcctgacggatagaaatagtaacagaggttccaatatattgggaaagagcagcttccaaagctgttcgcagagggccggttccaagactgtccatcccctgacggtcagaaggatgaaaagaaatggcgactgctacaccatcataaccggaaaaaacgctgttggctagaaagtccgcttgaagagggaatttggcggacatttgttccaacaccgttttccagtcttcttccgtgattgttcttcctgattgttgggacagaactgccggttcctctttttctacgggtgcctgggtttgggatgatgtgcttggagtatcgaatagattgtcaaagaaactgttagttcgtctttccagaggaagattttcctcaggatccataaaagtaggctctggagaatccgtaggaaatttcgacacatcggaggcatcggagtctggatgccgggtgatttcttcggaggcaggtacggtttttgtccgcaatttagtggcggagtagggaaattcttcctctgcaacggcaagagaggtggggggggcagcgggtgtaagagtttcctgttgtggttcggcttcctgcgtaggatggggagaagcttgagcgtcagtgctctgaattttctgtacttcgggagatgaagcaggggaggacacagaaaaatctggaatcggatccatcaaatgttcttccgtagctggggttggttttgttgcagcaacaggagactggatgtttggccggggggccggagtgggtgccgtggcgtaggaaataaatgtacttggttcctgctgtgaagcaagagctgaagaagtggccggtgccgcggtggctagcggagcaccttccagcgccatgataatatcgctgatgctggcctcagccagagtatgaacggctttaatcaggcccatttccagatgaagccttttattggtggaccagcgcattttatcttccgtttccgccagaacttccaccaaacgcaggattttgtccgtatgggtgcgtttgaccaattcggcgagttcctccttggaggattccgggagagaatcaaagctggcttctggatctactttagagaccagaatttcacgcacggcggagataatttcggaaaggaactggctcatgtctcttcctgcttccgcctgttcatgcagaagatgcaggagagagggaagttccttgttcaaaataagcgccagagcatgggccacggtctcccgggaagtaatgccgaaaatgtggagtacctgctgttcttcaatatgatctccacagaaggaaacaagctggtccagcatggattgtgcatcccgcatacctccatccgccactttggcgacagcaaaggctgcttccctgctcaaacttactccctctgcagaagcgatatggagcaggtgttctgcaatgatttcagaagggatggggcgcaggtcgaagcgctggcatcgcgatagaatggttggcagtattttgtggggttccgtggttgcgaaaataaatttgacatgaggtggcggttcttccagcgttttgagcagggcgttgaaggattccttagtgagcatgtgcacttcatctatatagacgatacggaaatttcctctgctcggagcgaaccgtacgttgtccctgagatcccggatgtgatcaatgccgcggttggatgctccgtctatttcaagaacatccaggctccgcccttccgcaatttcttcacatatatcttcatgcgggtcaaaatccactttgggcccaccgctgcagtttagagctttcgcaaaaattcttgcggttgatgtctttcccgttccacggggacctacaaagagataggcatgggcgagacggttgtgctcaatggcgtttttcaacgtccggacgacatgatcctgtccaaggacgtcatcgaatgtcagaggacggtattttctggcaaagacctggtaactcacggttcagaaagactagaagatgagttcccgtttgaaaagaaaatagagagtaattgttttaaaatgttgataaaacggttcttgcacactcccgttacggagcttgcctgaaaaaaatatcaagaaaacaatgaggatgtcattttgatattgaaatctgaaaatgttcatgccaatctcacaaaagtaacaggaaccttctcatctctataatttcctatgtgggtcaaagtatcaatagcagccttggtcattgctcttctcggaggagccatgtattatcttgataacgaggaagctctaaccaaggagcgtagggaatgtgcttcccgctacaagaacctgaacggccttcgtggcgaatttacggaagaaaagacgaaatatgtcgatttcctggtgaagaatgaggctctgacgaatgacatcaatgctttaaccaaggaaaaggatgaactggaagtaaagaatcaggaattggcctcagccaatgaggccaagaaatctgaccttcaaacgcagcaaaccgctttggcggaattgcaatccaagagcaaggatatggaaagtatccaagccattgctgacagaatcaaggggctggaagaagagtccaagcagttggaagtggttaagcaggcggaacagggaaagcatgatgccatcgttgcggaaactgaacagcttgttgtgaataatgccgcccttcgtcagctcaaggccgaccaggatgcccgtctttctccgcccaatctgaaaacgagggtttcccaggtgattcatgattttaatgtagttgtgattgacggaggagccgccgatctgggcgtggtgcccggttccaagttggccgtcatgagggacggcaacaaaattgccgagcttgacgtaaacgctgttgaatcccgtgtttccacggccactattctaccaagtacggtaaccgctggcgaacgtgttgaagccggagacgtcgttgtatctgttcgtccctagcatttttccggttcaatacactccatacactctcacatacatacacaatgaaaactgtcttagtagttttattgattcttgcagcaggggcgggtgcctggttctctggtcttagcggccttttcggtattaatggccagtaccaggattttaaagaaatgatttcgtatcgtaagaccttggacaaggaaatacgcacttggacaagcttgcgcaacgacatgattaagaatcgtggcttggctgcggaagaaaatcttagtctgatttccaacaaggcttccgtgacgcagcagcgtgatgaacagctttccaaggaagcggagttgaaggaagaagaagtgcagttgaatgcggacttgtccaaaatcaataaacagattgaggaattaaagagcaagttgcaagatttcggtgtttccagcgtacaggaaatccaggagaagatggaatctttggaagcttccaataagaagcttcaggaagatattgaccagattaaaagtgctacggaagtggcttccaagagacgggcagaacaagcttctgagctggctagccgccagaaggagcaagctgaataccgagctgctcttgccaaaaatggggaagagtatcccgttctgtccgtggacccgcagtggggttttgttgtgattggggctggacagggcagtagtattgatccaaatacggttcttcttgttacccgtgaaggtcgcagcattggtaaattaaaggtaacttccctggagaaaaatcagacggtagctgacattattaaagacagcgtaccgtctggtatgagtattcaacccggcgatagagtacaactcctgcgtccccgtcagtccgccaaataaaggtttgccacgtattttccttgaaccccgttgtgtcgtccggcataatggggttcaactttttaaaaggaaatgatgaaacgatttgtaatctcctttttgtttgtgtctttttctattcttctggtctcttcctgttcctggttgatggaaccgcaggagagggagcgtgtgccgcagccgcctcccggtccggaaaagagtgcgcttcctcataataagacccaaagatttgaggcggaagcaacgctcgggccgttggcgtcgccgagacgttaacggcatccgaatgacgctggacggtgattctgttctttacagtatccgacaaaccggatacaaccgcctccggtttccaagtggagagatggctgagctggtctaaggcactcgactcgaaatcgaacgtgggctttaaaacccaccgtgggttcgaatcccactctctccgccagtttttcagtaagagcctcgtcggaagacgaggctcttattttcgataggaagagaagaggcgggaattcagataggcggctgttcagtgatagagggtgcgttcttgactggggtctttaaggcggtctctgccaggatggttgtaactataataatttttgttggttgtttcggtcggtttaccaatgattacatgatccagaaaacgaacgcctaataatttggagcattcccgcacgcgttcggtcaggaggtcgtccgtacggctgggggctggatttccactgggatgattgtgggcaaggatgaagccataggcgttatgaatgacggtggggcgtaatatgtcacgtggatgagcaatggattcgtttaaggtcccgctggatatttccacgggtttgatgaggcggcacttggtatccagcagcagaacgagcaccgtctccttttccttccagcgcatggctgtggtcagataatcatagacatcttccggtgtttgaatgggttgacgtgacagagtttctcggagagccctcgctcccagttcaaaggcagcgctcagtgtagcggctttcgccatgcctattcccttgcaaatgttcgctatttcagcagcttccatatgagctagggcatctagagagccagcagactgaatcagatccgaggacatgtccaacacatttttccccttgatccccattcggagaaagatagcaagcagttccgcgttgctgaggctgtgccttccttggcggagcaatttttctctgggcagagactgagagggcagttcctgaagtttgcggtaggtcatttcaataacagaggcgtgcggtagaaagaatggcggaaggcagatgtcgcagcgtatcccctgccgtcaatgtttgctgggtggcttctccggcggagattgccatttcggaagctcggccacacaggtagacgcccagaacggcggaaaccagcagggattccccctggcttataaagcctccgcaaatacctgccagcacgtctccctgaccggcagttgccatgccgggatccccagtgatgttataaaaaagaggttttccccgttgggtgacgatggtgcgtgctcccttgtaaatcagggcggcttcatgttctgccagaaagcagtcggcaatgtctgcccggatggcatagttgtctgcatctggcagaagtctgcgattttctccatggtggggagtagccagaacgtgttctcccaagttccactgcatggctgcggccagattcagtccgtccgcatccagaacagtgggggtacctgtttccagaatgaggcggatggcttccgcatcttcctccgatacggaaccgatacctgggccaatgaggaaagcactgaatgtgcgaatggagatatctgcgtaactgtccacgggtctgaccatgatttccggaggcatggatggagcgattaagggatagacgtttttgtgaacgtgcagtgtaaccagaccggctcctgcccggagagctgcttcacagcagagccgggccgcacccagcattccttcagagccagctatgacgccaatgtgcccgcgtttgttcttataatccgtatagggtcttgcagagaggaatttggtaagccgtgaggaggtaataagttccgtggcggggagcgcctgtacgtgaagaccgggaaggtcaatgcagactaagcgtccggcaaacagggtggcgtcatcgtccagcaggccctgcttaacggctcctatgcacatggtgaaatctgcttccactgcattttgctgaggcattcccgtatctggatccactccggtggggatatcaatagccacggtacgtacagccccgcaacggtttcttatatagttcatttccgcgcagagagcggagatttccctgcggagcattccctttgcccctattcctagcaggccgtccagcaggatcataggttttcccgtacggggaaggggaggggcctggtattcctgagggggaggagatatttccgccaactgccgcacggaaagttcgctccattcgttgcgcgggtaagcggttcggaagcctatttcccagccatgttgtttcagtatgttaaggacggtgagggcatctcccccgttattccctttgcccacataggctacgcacaatcccgggtcggggaagaactgcatgagagattccgcaataccggcagaggccagtttcatcagggttctggctggtgttccgctaacgatgagctcgcgttccgcgatctgcatattttccgtggagcaaactttcatggcatactgatagaggcagcctttactgtaagctaaaaaaccttctcctgcaagccggagaaggtttttaaaaagaagcggaccagggagcagctaaccgatgcggaacgtgatgcgcgctttggtcatgtcataaggagacatttccatacgcactttgtcccctactacgattttaataaagcgtttgcgcattttgccggaaatatgggccagcacttcgtgcccgttgggaaggcgcaccttgaacatggttcctgccagtacggcgcagatggtgccttccacttcaatttcactttcggagttttcttccttggactctgatttattgaaattctttctgcccttggtgtggcgtcctccgcctccttgcgggcgttgcctgttggcgttacctccggggcggcttcctccccctgttctggaatttcccggtcctgcagactgtccggccgaccgtgccgctcctgtgccattgccggaaggcctggattgtccaggacggttactggtgccggtcggtctgaaaccggggcgggaattttgtccgccgctggggcggctgctggatcttggattcgggctgataggactctccttgtaaagttaaaatgaacgcgtgtgcaaatcccgcgcaggcgaatgatagaccatatttttgcaagggcaagtcctgaatgcggaagttgtgcaaataaaacacaattctatggagagggacgggaaaaaggctgtaaaagagaaaaagtatttgacatttacgtgaataatcattaggaatgcgcccccgaattggaagataacggcaggatgccgaaaaacgagaacgaagaattgaaccatgaagaccttctcagccaaaccgcaagaagtagagcgcaaatggtatgttatagacgctgccgacaaggtgctcggccgtgttgccgttgaagcggctaacattttgcgtggcaagaacaagacaattttcaccccccacgttgattgtggcgattttgtcattatcgtaaacgcggacaaggtggtgttgaccggtaacaaggaaaatgccaaaatttatacccgtttctccggttacgttggcggtaagcaggtggacaccccccgtaagattcgtgctcgccgccctgaacttcttctggaactggctgttaaaggcatggttcctcacacccgcctgggccgtcagcaaatgaccaagctgaaggtttatgcaggcgccagtcatccgcatgaagcccagcagcccactgccattactctctaattgatttttcagacatgagtcagacaaccccatacaacgccaccggccgtcgtaagaccgccattgcacacgcttggcttactgaaggttccggtcgcatcacgatcaaccgccgcggttttgaggaatatcttcctaccgttcagttgcagaatgctgttcttcagccctttcaggttaccaataccatgaacaagtttgatgtgaacgtcgttaccaagggcggcggtattcacggacaggtgggagccattcgcatggcgatcgcccgtgctctcgttcaggttgatgaagcttcccgttcccagcttcgtgaattcggtcttctgacccgtgattcccgcatgaaggaacgtaaaaagcccggtcgtcctggagcccgcaagcgttatcagttctccaagcgttaagcttggctggttgcgaaggaactggctttaccatttctttctcggaaaaggagtactccctgtggagtgctccttttttgttgcaggaagaattttgctttttactgcttcacgcgtttttaaaaagctttttctggttgggttgcttacggcagctttcaatgattttcctgcatttgctgtgaagggggggaggtttcccagtgcaggaatggttggttgacgagggttaccgatggtatggtgttcctgccagaatagtgtggcagcggtaaagctgttccagcaggacaacaagcgccagttcatgttgaagggtgaatttgctcaaggacaggatatgattgcaccgggaccgcaattcttccgtatgaccgtctgaggctccgatgagaaacgcgatgcggcgtacggaatgcatttgccagtcctttgccaggtcgactagctttcttgtggtccaaagttctccgcgttcgtccatggcgatgcgcaggcaaccctcgctggcggccagcagacgtttagaaacgtcttgggagcttccgtccctgacaagcttgagttccgttttgccgaagggcctgaggcggttgagatagagttccacgccttccttggcgtagcctagagaaggctttccggcagccagaatcaggaattgcatgagaagtcaggagttggaagatgagttaaggtagttcagcagggtgcgggcccaagtttccgaaatgccgcggatggcggcgatagaagccgggtccgcctttttaatggcagttacggatttgaatttttccagcaacagtcttttttttgaggcgctcatgcccggggcgtcgtccaaggcgctttcccgcatgcgtttgcggtagagcagttcgttatagccgttggcgaagcggtgggcttcgtcgcggatgcgctgcatgagtttgagggctcccgtgctgtgaggcaggcaaaggggctgggactggtggggaaaaaatatttcttccctctgcttggccaggcctacgatgggcatgtctcccaggccgatggcttccaaatcggccagagcggaggaaagctgtcctttacctccgtccacgactaccagatctggaactttgatgggggcttttccttccgcgctgagtttcttaagccactggtacagggtcatgtccgcctgccgtgaggctacggcgtcgctctccgccagaatgcgggagtaacgcctccggatgacttccgacatggaggcgaagtcattttgtccgtccacagtacgtatacggtaccgacggtaggctttgttatccggcctgccgttggtaaagcgcaccatggaggctacgatatggttggaagagacattggaaatgtcaaagcattccatgatggttgggggagattctaatcccagggccacccccagttccttcatgtcttcttccggatgaacggtgccgggaagatcgggagttccttttcggaaccgccgggcgggttccagtaccttgaccagattgtctcggatgtcccgcaggtatgccgcacgttcaaagtccagttcatcggcggcttccatcatttccctggtaagttcgtccagagtgctttttctgcccgttccttccagcagacgcaccgcctggtcaaagttccggttgtaatcattgatggaaatgcggccaatacacggagcggagcagttgcgaatcacatccgcatggcagtgcctgaagtcatggattcccggattttttgtcttgcaggttcgcagccggaaatgccggttgagccattcctgcgtggcgtaaagagcctgggagtggacaaaggggccgaagtagcgcgctccgtcatctttgcgcactcgcgccagctggaaacgaggcagtttttcccccttcggatttttcagcagggggtagcgcttgtcgtccttcatctggatattgtaatgcggacgatattgtttaatcagtttgctttccagcagaaaagcctcctggtcatttctggtttcaaaataatcaaatgacgcaatagcgttaatgagcgctcttgtcttatgattggagagtgtggttcccgtgggagaaaaatagttgcccaggcggcggtgaagatccttggctttgcccacgtagatggtatttccccgggcgtctttcatgatataaacgcctggtttgtgcggagtttccctccagagtgctttcagggttggtttctcgcggtctgccacgcaggcattatgccatatgaggcaagaaatggaactgcggaaacgtactgtattacggctacttggcttgcctaggaaaacttcttctgtataatcccctatgtcttttgtatgaatcctgtaccgtttaccacgctggctgccgccatggattttgtagtgggagatagaaattatcccctttccgaactgttcatgaaaggcggtttcatcatgtggccgctgcttttgttatccatcgccggagtagtggtgctggtcatgtgctgtttttctacccgagcttccgccgtcctgcctaccaaactggtggaacaggcggaatctttcattcgcaaacgggattacacgggactttccatcctctgcaagaatggagattcctgctacgctcgcgtgatgttgactgtagccaacttcatgttgcgcaatccctccgcccagtttgaggaggtaagggagatagcctctgcggaaggaggacggcaggcggggttcctaagccgccagatttcctggctgtcggatattggcgccgtagcccccatgctgggtctgttgggaaccgtggtcgggatgatgaaaaccttttttgagattgccaacggtgatttttccgggggcaagcagcgcatcgacatggcgggcggcgtggcggaagccttgattacgacggcgggcggcctgatgcttggcattcccgccatcctggcctatgtatatttccgcagccgtgtacacaaacgggtgggagacctggaggcagccgtcacgcacagtgtttccatagttgccacccagcttcagaagccacgagtcggtgcagctggggcttttcatgaagaggaacttcccaaagtccccgtagatcccacttccctgcgcgatgtgcgtgggctctagccggaacgcatccacttctccacctcaccggaagaatgtatgaaatttcattataaaatgcccagtcccatcgggtttcaattggcccccatgctggacatcgtatttctgctgctggtgtttttcatcgtaacccagacatttgaggatgatgaaccggatctttccatcaatcttccttcagcagagactcccaagcccggtgaaaacgtgtccaatgaaattatcgtgaatatccgtaaagatggtaccgtggtaatcaaccgccagcattacacaatgccgcagctggaagacaaacttttttccgtcgcccggttggacaaaaccatgctcgtccgtatccgcgtggatgagaaggcggaatccggcgtggtggtgcatgtgatggacgcatgtctgaaggccgggctgaataacgtttctttttccacgcgtcctccggttccatcttcaatcaatgtttccaattcccaggcttcatgaaagcgtttttttccattaatgcaggtttaataactttggcgatgttttccgccgcccaggaaaatattccggatgccgctcccatcgcggatggtccgctggtcgctaatccggagcaggatacgctggatatggcggacatgctgtacaagcaggcccaggctccggctacgaaggagaaccggcaggaatatggacgccttcttgatttaagcttgcgtaaatatctggaatttacccaacgttttccccagtccgcccaggctcctctggcggagtatcgtgctgccatgtgtttggaggagctgggcaggaaagatgaggcacatggcctgttcctcagattgattcagacgggcagccccgccctggttgccgcctccgcctaccgtctggcgacggatgcttcttctgccggggagatagataaggccatccagtattaccagctcgtgattcgcaatgcggaacagaatgatttgaaggtggacgcccagtaccgtctgggacgcctgtttctttccagcggtaatccggaggcagccgccaccatgttttgtgcggtgatgggcaatccggaagcggatgccaagtttgttctggtgtcccggatgggatatgccgccctgtgtgcggatacgggacgcttgggagaagcttattccgaatatcgcaaggtgctggaaacgcccggtgtggataacaggaacaggggaatcgctactcttcaggccgccatgctggccaccaaactgaaaaagactgcggaagcccagggcctttatgaacggcttttgaaggacgagtccctgaaggagatggcgccggaggcccgaatggggcttcttctggggctatacaatatgggcaagtacagggagatactttcccagtatgagcagcagaagggaataaagatgccgacaaaggacggccaggtgcgtctgctgatgctgctggggcagtccgcctataaattgaaggagtaccggaaagcggcggatttctttctggaagcggaaaagtccgttccttatacgcaggaggccatgcaagcctccttttaccggttattgtgttataatgaactcaagcaaaaagatcttccccagcgggcccagagcttcctgaaccattatgccaaggcttttcctaccagtgaactgcatgatatggtgcgcttgatggctgcagagaacctgttcagctccaatccggcggatgccgcccggttttatgccagcattgattttgacaaggtgcccccgaagatgcgtgcggatattttatataagagcgcatgggcgattgcccaggccgggaacagaggtgtggccgccaagctgctgactgattttatcaatgattttccgaaagatccccgcatttgcgaggcattgacgttgcgcggggacatgtatgccaagaccaagaaggaagctgaggcgctgatggattttgaccgtgtgattgcccgctggccgaaagctgaatcagctgccgccgcatggcagagagccgctcagatttatgcgggacgccaggatatggcgaacatggcgaagtattatgaaggcctgattcagaattttccgaaggcgtctcctgccgctctggctgaagcccatttcctgctggggcgtgcggcgtttgaccagggagatttcaagtcttctatcagccatatggcggaggccaagactctggatccccagaaatacggagaacaggttaatgtgctttccgttctgtcctatcacaagctccaggacgtgaataaactgaaggaagccctggaaaccctgcaaaaggaaaatccttccgccgtggctcgtgtgccggatgtcatccccgcatggctgggccttcaggcctatgggatgaaggatctggaaacggcggacaagtatatgacctgggctacgcagaacgaccagcttcagaatgtgaagaaggtgatttggcgtaatttggcgaaggtgcgcctggcgctcagaaaatatgaccgcgccttggtggcttccaacaatttcctgaaggatgaggaccagccttaccgccgtgcggacggcatgctggacaaggcttccattttgctggggctgggcaagtatgcggatgccaggaagacggcggaagatgcgctggctctgggcgtggaaggtcctctgatggcttccttgaaaattgttctgggggatatttcctatgcggagaaaaagtttgatgaagcggccaagcattacggtgttacggccgagctgtttgtcaatgacgccgaactgaaacccaaggctctcttcaaggcggcggaagctttggacaaggccgggcgcaaatcggaggcttcccaataccgggcccgcctgcaaaaggaattcccggattggaaacaggatggagagtctttgcctccggacgcacgataaacgttttaaggattgaaaccggaaatggagaacaggcgtaaaagatggtatgatctgtttggattgctgcctcgcaatctgggccgtctgttgctgtggttcagcctcattcctatcgctttcatcatcgtccttctcgtttatgcatggagggcggaccagtatgagctggacgaggttttggcgccgttggaaaattgcgccgcatatgatcgcaacggccagtggataggcaccttgacagatcatgaccgggtgtatgtagcgcgcaatgaactgcccgataatctggtgaatgctttcgttgcgcgggaagatgaagactttttcgaacatggcggcattgtgtactcttccattatccgctccatttgccggaatttgactacattgtcctatgcccagggtgcttccacgattacgatgcagctggcgcggaattgttatgagctgggagggaagaccctggatcgcaaggttttggaaatggccgtggcccgccgcattgagggcaagtattccaaggatgaaattctgacggcttacctgaaccgcatttactttggccagcaatgctatgggattgcgcaggcggcggatttgtatttcggcaaaaaagtggcggatctgacactggcggagtgcgctaccctggccgggctggtgcgcggaccttccatctacaatcccgtttacagcccggaggctgctgccaaggtccgcaatgcgacgctggaaaggatgtttgagtgtgaattcattacccaggaacaattatggcaggcgctccgcgaaccgatggcggtggccggtaaacgggaagctcggcccggttcttatcccgttctggtcgtttcccgtgagttgggagacctggattgctgtgacgagcaggagggaacctccagcatttttgtaatgaccacgctggatttgggatttcagcggatggttgaagatgtaagcgagcctatgctggtcgctctggaatcttcttccgtgtgggcagggttgcccaaaagggtggacaaccagttgaatcgttgtgtgcaagcggccatattgtgtgtggattcccgtaaaggggatctgctggccgtaacaggggggcgttccgcccaggacggtctggaccgatggcagtccaaggtaatgcccggcgatctgttcactcccattgtcaatttatgcgctgtcgaccagcgtagaaccgttattcgcagcaatccggaagtcactggccgcggggtaggtttcaatacagtaatagaaacggcacaaaaggccggttacaaaggggaacttccccgttcttcggacttgtataccggcaggttttccgtgcctctttcgcatgccgtcaatgccctgtatctcatcggcaatgacgggctcaatgtgagtatttcctccgtcaggcaggtgggtaccaccaaaaagaacctggtgatggtgaatgccccctctccggaagaaagccgtcgggaaatcctgcctagggaatccgcccacctggtggcgtcccttcctcccttccgctacgacgaacggaccaggaaaaccttcgtcaatgtcaggcttcctggaaatacggggcatttttccgccgtcatggggcgttatttcacggtttttgcctgggtgggctttgattctccggaggccgccgcctatgaaaaaaaaggggtttccgcggcgttggcaaaaacctgttcctctctggccggggaggtgtatgaccgtgcggaggaaggccgcagaaaagctgtccgggaacgccgggagcgggaaaatgctgcagaacagggctcccaatgaagttcaattttccattagtagaagcatcatgagacactcacttgaaatgaccacggccatccaggccgccaaatccgccggagctttcctgaagaagcatttttatgagcaaaagaaggtggatgaagccagccagaatgatatcaagctggagctggacaagctttcccagaaactgattacggaggaaattctttccgtgtttcccaaccacgctgttttgggagaagaaggatacaccggggacaggaacagcgagtatgaatggattgtagaccccattgacgggacggtgaattatttttacacgattccctggttctgcgtctccatagctttgcgccgccgcggggaagtggtgctgggcgtgatttacgatcccatgatggatgaatgctggcatgtggaaaagggcgggattccgtacatgaatgatcatcccatgcattgcagtaagcgggaacgcatggcggaagccgtggtattcgtggggcacggcaagacggacggttccaaggaaaaggggattgaacgtttcgccaggatcgcctggcaggtacgcaaggtgcgcaataacggttctgcggctctggccctggcttatattgcctgcggcagatttgacgcctatgtggaaagcgtcatatccatctgggatgtcgccgctggggttttgctggtggaagcagtaagcggcaaggttgttttggaaccgaaggaagataatccggaacaattcgccattgtcgcgtggaacggccgcatccctatcatggaggcgctgggagagtaacccgaacattattgccgcagtaccgtatgaaaaacatgatcgctttgaccgggatcgggtatgatatccaccgttttgcggaagttccgcgccccttgatgctgggcggtgtgcatattccttcctcccgcggcctggacggccattccgacgcggatgttttatgccacgccattgcggatgccctgctgggcgctgccgggttgccggacatcggctactggtttccgccgggcgatccttcctgcaaggacatcccttccctggatattgtggcgaaagccgtttctctgattcgggagcgcggcggccgcatcgtgaatgtggactcgtcccttattgcagaatctccccgtatttccccttatttggagcagatgaagggagctttgggcgccgctctcggaatctctccggtccgtgtgggcatcaaggccactactaatgaacagcttggcgcgctgggccgcagggaaggcattgccgcttttgccgtagcggctattctgatgccggaggatttgaccatgccgtaagaagaacactccggttccgtttctggaagcctttttttcaaaaaagaagccgatatggggctttaaacaaggaatatgcttcaggaataacgggcaggtggaaatggcgttttttgggggaggccctttcccaggcagttttaatgaaatggcaggaaattgttaaccgttccctggcggcaaagccgtttttggctgcataataatattacccgtttccctgcacagggaagaggtgttgcctgatactcagctgatgcagcggtaataataatccacgcgggagatgaaccaagaccatttgaagccgggtttgccattgtccagcagaaggtgggggcaacgcttgccggtccagtagtaatggggcacgacattccgcaggggaatatcgtgggcatacatgttgtatgccgccagcttggcggcgcggtcaaaggttttgacgatgctctgtcctcgcttctcacacatttcaatgccgatggagtacatgtctccggggccgcctcggtccgcatggcgtcccgtttcattcagggggatatgctgcatggtcacatacgggtctaccgtataatgccagttgcagcgcaaagctccgttattcagggcgcgcgcatgctgcatggcgtctgcggacgggttttccgtgttgtgcatggtgatgaagcgcggcttcattcgggaagaacggcggcggagcggagaagatttaggcatgaacatcggccggacgttacattccgccagcaattggcgcggagaacgtttcaccacggggaccccggagggcttaaaggagatcatgggagccattcctgcttttccggaaggttccgaacaactggtcagggcaagcagggcggcggtttccagcagaaaagttctgcggtccatgccctggactttctccagcatgggctggagctgaccggaaaagcgggcaagataagtggcgatggtggaaatattgctcatacggaggccgggagatggggaattttcagcacggatgcgggaaaagttaagttcacgctaagattcgctcttcttctttgcaacgaaaaagtgtgaaagcttcagcattgtgccgaattcttcgctctttttgtcatattggtttgcttaaaccgttgttgagagcagaacagtctctgcttctgcggcggtgacggcatccgcgcctgccggggacagaatgaattctcccttccgggccgttttcccgtcccagagcacggaaccgcagaggaccgtgaagacggcaaaacgggaggagtccggctgggtaaaccgttctcccttatccaggcggtattcctttgtggtgaaatacggcatttccgtcaggtatccggggcgctggctgagttcccggaattccccgatggaatccaatgcctgttccaggtgcagttcccgtcctcgtccggagtcatccgtgcggttccagtcataaaggcggtaggtggtatcgctattctgctggatttccgcaatgaggtgcccggctccaatggcatgaaccagccccgccggaatgtaaaggtgttcccccggttccagatgggtggagcgtatcagctgctccatctgtcctgtttccgccgcatgacggatgtccgggagtgtggcgttttcctccattcccccgtaaatcagggcgtccggggatgcgtgcagcacataccagatttcattttttacttctccctgccgggctgccgccgtgcgttccgggggatgcacctgaacggaaagattttcgcgggcatccagaattttgcagagcaggggaaagcgggggaaacgctcgtagccgggaccgaaaatttcctgccgatgttcttcccacagccggtgcaggggcattccttcccattcgccatccttgacgatactcatggcttcaggacggtcgctgatttcccacgcttctccataagctgtttcccggtcgggcagttcccgtcccagcatggttctcatgctctggccgccccagatgcgcggctggtagatggaatggaatcgaaaaggctgcatggttgtagcggaagcgtaggatatcttttatggacgggcaagcaaaatgcccacagggtttcctgtgggcatggagagagaggaagacggagaattgcctgttatttgatggattcccagacaatgccgatttcgtcaaatggcacgtgttccttgttcttgtccggtttcggaacgccgtagttggtccggaacaggggcaggatgggagctcccgttttaggatccttgctcatgggggccattccaacttcttcaagcagaagagtcatgccgaattccccgccgggaatttcgctgatcagaatctcaatgggataaacattaccttgcttcactttgaaggatttgctagcaaccacgcctcccatggtccggttccagtggccggaagaggagtatttgtagaatgtaacaggagggacattgattccggctgttttgagctcttttttcaggtcgtcgtaaccgggcttgttttccatggctgcaatccatttggtagatgctgtctgttttcctaaggaagcctggaaccacccgtagtcaaatacgttttcattgttgaatcgtacggcaataacgtcgtcgcccgctcccacaaagcggaatgttccggatttcggagcgcgcactttgccacgatagatagcaatccatcggcttggcttgactttgtccgcacatccgtaagctttcggagcttcattggcggatgtccggggcacgtaaaattgggcggcgtacagctgctggggagatttatagaaacggtttaaatctttttcatcccaaccgtgggtgacaaagcgggagaggatggagcagaactggtcttgggacaggttggtaggacgtccgccaggagtctgcttggtgtcgtaaaaggtacctaccagcgtgcttccggagggttgggacgtaccgaaagcagaggtggagtctcccaggtcggggccgaagccgtcccccatgccgagggcggttccctcctccagcatgacaggttcatcgggcgggtcaatgtcgatcttggggaggctcaccggagcggcggccgctgccaccacgaccttgacgggcgtctccgcatgggaggaagaggaagtttccctctgtacttccggcggcggaggcgtatccgacggcggcgcatcgtccggcgtgatgtagccgacgactttgggttcttccggaggggcgatgatgatggtcagggagtagagaatggctcctgccaaaacgacggagagaatggatgtcgctaatgcggcaatataatttttccgcctttccttgcgcagggtttccactgcgtcttccgtgggttctatatgaaggctcatgcatgtatgatagcacaagaatcccatatgttgagtaacatgaagataacagggataacatgtcggtaacaaaaaaggcggccttgccgtcctttctccgtatgggcttttcagcgtttcctccgtctttccgtccctcccggtgccagcgcaatggcaagggtggagcagatgcccagaatcaggggataatacaggtatttcatgatcagcaggggagaaacctgggagattccggcggccatgagcatttgagccccgtaggggatgactccctgaaccaggcaggaaaaggtgtccagaatgctggcgctgcgtttgggtgggatttggaatttgtcgcttatttccttggcgatggggccagccgtgatgatggcgatcgtattgttggccgtgcagaggttggccagggaaaccagcccggcaatgctgaattccgcgccgcgcctgctgtggatatgggccgtaatttttccgataatatacgcgatacctccgttgaaacggatgatggacagcacgccgccagccagcagagtgacgatgatcagttctcccatgccggtcatgccgctgcccatggcttggaaccaggccatgaaggagaaataccccatgccgatgccaatcagtcccgttgcaaggagccccatggtcagaacggccatgacgtggattccggccagggccgtcaccagtacgagcagataggggaataccttcatccattcaatggagatatccgctgtggagggggactgcacgttccatccgagcaggatgtagcaggccaaggccagcagggcggcggggagcgccacctttatgttggctcggaatttgtcccgcatggcgcagccctgcgtacgggtggcggcgatcgtggtgtctgaaatgaaggaaagattgtctccgaagaatgctccccccaccacaatggccgtcatcatgccggcactgacctgcgtggcttgtgccagccctgtggctacgggagccagagcgacaatggtgcctacggatgttcctacggagagggagatgaaacaggaggcgatgaacacgctggcaaacagcagattgtccggaagaagccgcagcgtaagctgcacggtggcgtcaatggctcccatatccctagcagactgggcgaaggctcctgccagcacgaaaatccagaccatcatcaggatgttccggttggctactccggaggaaaacagatccacccgttccgccatgctttttccgcgggtgatgaaaacggcccagacagctgccgccataaaggctaccgtgaccggcacggcgtaaaaatcctgtacggctatggagatgaccaggtaaagcaggaagaaaaccagcagggggctcagtgcccacaggctggctttggcggggggcgtatcctggttgtccggggggctggtcattggagtgaggggagctggccgaaaagtcagttgccgtcggcttccatccggctcagataccaccggtaaatgcgttccactccctcttccagctccacccggtgtttccagcccagggagtgcagcttggagacgtccgtcagcttgcgcatggtgccgtccggcttgtctgcgttgaacgccagatttccccggtaccctgccgtagcggcaatcaggcgggccagtccgccgatggagatttctttcccggttccgatattgatgtggcagttccgcacttcccttcctccttcttgcagctggctgaaatccacttgctccatcacatggacgcaggcgtccgccatgtcttcgctccacaggaattcgcgcaggggagttcccgtaccccacagttccacggaaccgggggtaatgccgtatttggccagcacggccaggatttccttttcttcagccgtgccgtccacctgttccactgggcgcgcgttcagatctttccgcacggcgttccagtctccctccatcaggcacttggccaggtgtatcttgcgtaccatggcgggcagcacgtggctgttttccaggtggaaattgtcattggggccgtacagatttgtaggcatgacggcgatgtagttggtaccgtattgcaggttgaagctttcgcacattttcagccctgctattttggcaatggcatagggttcgttggtgtattccagcggggaggtgagcagggcggtttccttcatgggctggggggcttcgcgcgggtagatgcaggtgctccccaggaagaggagcttggatacgccatgccggaagctttccccgatgacgttctgctgaatctgaaggttgcggaagatgaagtccgcccgatagcgggagttggcgatgatgccgcccacaaacgccgctgccagaaagacgtattccggcttttcccggtcaaaaaactcccggacggccgcagggtcttccagatccagttctttgtgcgcccggccaatcaggtgggaatagcctttgttttccagggatttccagatggcggaaccgacgaggccgcggtggcttaccacaaagattctgctgttttttttcatctcagaaatgaacgggagtttttacgtatttcatgtcgtggcgcaccatgatgcgcacgagttcctcaaacggagtggaggtggggttccagccaagaagggttttggccttggttgggtctcccaacagttgttcaacttcggcagggcggaaatatttggggtccacttccaccagaatattgcccgtcttcctgtcgcgtccgcgttcttccacgccttctccctcccattccagctctattccggcttcacggaaggccagcgtgcagaattccctgaccgtgtgcatttccccggtggcgatgacgaaatcctccggtgtgtcatgctggagaatcagccacatgcattccacgtaatccttggcgtaaccccagtcgcgcagggcgttcaggttgcccaggtaaagcttgtcctgcataccctgggcaatgcgtgccgccgccagcgtgattttgcgggtaacgaagttttctccgcggcgttcgctttcgtggttgaacaggatgccgttaacggcaaacatattgtaagattcccggtaattcttggtaatccagaatccgtattgcttggctacgccgtagggtgaacggggataaaacggcgtggtttccttctgggggacttcctgcaccagcccgaaaagctcggacgtggaagcctggtagatgcggcatttcttttccatgcccagaatgcggacggcttccagcatgcggagggttcccacggcatccgtttccgccgtgtattccggtacgtcaaagctgactttcacatggctctgggctgccagattgtagatttcatccggctgcacggtctggatgatgcggatgagtgaactggaatccgtcatgtccccgtagtggaggttaatcaggcggtttttcttcatgtcccgcacccattcgtccaggtaaaggtgttcgatgcggcccgtgttgaaggaggaggaccggcgcaggatgccgtgtacttcataccctttgtcaatcaggaactctgcgagaaaggaaccgtcctgtcccgtgatgccggagattaatgcgattttgctcatatggtgtgtcaggttgtttgctggcgggagaggttgatgaaataaaagaaacctctcccggagccgcaattcatgggctccgagcataaataacgcatttttcccagcgaggcgaggaaaatgctctggtccgtaggaagggggcggattcgtcagcgggcatgttgccgcttgctggccgcaatcattttcctgaaatcccggaacagatactgggggtctctggggccgggcgccgcttccgggtggtattgcacgctgaatacgggaagcgtcctgtgggcgatgccttccacggtattgtcattcagattgatcagcgttatttccacgtcgtccggcacggtgtccggatccacggcaaaaccgtggttctgggacgtaatgctgattttacccgttttcaaatctttgaccggatggttcgccccacggtgcccgaacttcagcttgaaggttttcgctcccagcgcgtgggaaataatctggtggcccaggcagatgccgaacatgggcactttcccaatcaatgcagctacttcccggtgaatgtccgtcagcgtggcgggatctcccggaccattggaaagaaagacgccgtccgggttcatggcaagcacttcctccgccgtcgtgtgggcgggaactacggttacgcggaagccgttttccctcaactggcgcaggatgttgtatttaatgccgaagtcaaaggcgacgatgtcgtattccgcagggggcagagtttttcccgtaaccagcgcgtccacttcctccggtgtcatggggtgggaaccgattttgtccacgatattgcagccttccatggagggggcgtttctggctgcttccacggcttcctccggagtcagctccgtggtgaggcaggcgcgcatggctccggcggagcgcagatgcttggcgattttgcgggtatccaccccttcaatgccgatgacgccctgtttttccagccacgggcccagggattccgtggcacgccagttggagtggactttcgccagttccgccaccacaaagccgctgacctgcgctttgcctgattccccgtcttccgggttgacgccgtaattgccgatcagaggataagtcatggtgacgatctggccgctgtaggacggatccgtcaatacttcctgatagccggtcatggacgtgttgaagcaggcttcccccacttccgtgcccgtggccccgaagtgcgaaccgatgaagacgcttccgtcttccagtgcgagaatggctctcatggtgatgtaagtatgcttaggtggtgcgggattaaaggttttgggcgtggtactcctgaatagtgcacacctgaagatttttgttcttcagcgcctcaatggcatttacgcaggcctgcgcggaagccaggttggtgcaataggaggttttggcggcaacggcggaggaacggatgatgatgtcgtccgcccgcgcgtcgtgggagccgggggtgttgatgatgaaatcaatatccccgtttttaatatggtccacgatgttggggcggcgcgcctcgttgactttgtaggcgcgttcgcattcaatgtcgtgctggagcaggtgaatcatcgtgccgcgcgtggcgcacagcgtgaatcccatgtccgccagctgccgggccatgtgaagcacccgttccttgtcccggtcattcacggagatgaagaccttgccttccgtcggcaggggattgaatgcactgacctgggattttgcgaaagcgatatccggatcaggatcaatacccatcacctctccggtggatttcatttccggccccagcaccacgtcgatgcccgggaagcggccccatgggaaaacggcttccttcacgcaatagtattccggagtgatttcccgggtaaagcccagttccgccagcgttttgccggccatgacctgtgcggccagcttggcgaggggcttgccgatggatttggagacgaacggaacggtgcgggaggcgcgcggattcacctcaatgacgtaaagctgttcatcttttacggcaaactggatgttcatcagcccgcagacgttcagtttgcttgccagctccttggaagcccgcgtgatttccttgtgcattttcatggaaattcccatggcgggaatcatgctggcggaatcccctgaatggatgcctgccggttccacatgctgcatgatggctccgatgacggcgcgctccctgtccgcgatgacatccacgtcaatctccacggcattttccaggaagcggtcaatcagaacggggcgttcctcggaagcttccacggcttcattcatgtaccggcgcagttctttttcctcatatacgatgatcatgccgcgtccgcccagcacgaaggaggggcgcagcagcaccgggtaaccgatgcgcgcggcaatggcggcggcgtcctccacattggtggctgttcctgcctccgcctgtttcagccccagttctttcaacagggcggaaaaatgttcgcggtcttccgccaggtcaatggccctggggctggtgccgataataggcacgccgtgggcttccagcgcattggccagattcagcggcgtctgtcctccgaactggacgatgacgccgtccggcttctcctgctcacagatatggagcacgtcttccagcgtcaggggttcgaagaaaagcttgtcggaggaatcatagtccgtggagacggtttccgggttggagttcacgatgatggtttcatagcccatttcccgcagagccatggaggcgtgcacgcagcagtagtcgaactcaatcccctggccaatgcggtttggtcctccgcccaggatgaggattttttttctgcctgtttcgcgggcttcattttcatccccataggtggaataaaagtagggggtgtaggcttcgaattccgcggcgcaggtatccaccagccggtatccgggcacaatgccctgttcctggcgttccttccggatgttttcttccgtggtcccccgggccagggcgatctgcctgtcggaaaagcccagcttcttggcttcccgcagatccagcttgtccaggctgtctcccgccttggccaggtcctgcatttgtgccaggaaccagggatcaatctgggtaagctgctgcacttcatccagggaaaatccgttgctgaacgccgtttgaatccagaaaatgcgttctgccgtgggaacagccagtttccgcgtgatttcttctgcggaaggcgcctgcggggccttcgcgtcaaatccccagccccagcgtcccgtttccagggaacgcaaggccttttgcagggattccttgaaagtacgaccgatggccatggcctcccctacggatttcatggacgtggtcaggtgttcgtccgcctgcttgaacttttcaaacgtgaagcggggaaccttggtaaccacatagtcgatggtgggctcaaagcaggcgggcgtttcccgcgtgatgtcattccgcaattcgtccagcgtatagcccacggccagtttggcggccagtttggcaatggggaaccctgtggccttggaagccagcgcggaagagcgggaaacgcgggggttcatttcaatgacaatcatgcggccgttggccggattaatggcgaactggatgttggaaccgcccgtttccaccccgatctcccggatgacggcaaaagaagcgtccctcatggcctggtattctcggtccgtgagtgtctggatgggggctacggtgatggaatccccggtatgcacgcccatggggtcgatgttttcaatggagcaaatgacgacgcaattgtccgcgcggtccctcattacctccatttcaaactctttccagccgatcagggactcttcaatcagaatttcggaaacgggggaaagatccagcccccgggcgcatatctcttcaaattccgttttgttgtacgctacgccgcctcccatgccgcccagcgtaaaggcgggacggacaatcaggggaaaggtgccaatatccccggccacccggcgcgcttcctccatggtatgcgcaatgccggaacgcggcacgtccaggccaatgcggagcatggcttccttgaataggttgcggtcctccccgcggtcaatggcgtctgcgttggcgccgatcatacgcaccttttccctttccagcacaccgctgcggtgcagttccatggcgcagttcagggctgtctgcccgcccagggtcgggaggagggcatccggtttttcccggatgatgattttctccacgaactccggagtaatcggttcaatataagtgcgcggagctgtctccgggtccgtcatgatggtggcgggattggagttgaccagcactacttcataaccctcttcccggagggctttgcaggcctgggtgccggagtagtcgaattcgcagccctggccgatgacgatcgggccggacccgatcacgagaatctttttgatggaggtgtctttaggcataatggcgatggaagaatcctgtagtcctggaccgcggatttccgccgggggaattaagtgcccgccgggctccggaggaaagtttttttacggtcaatgacgcggatttttagagcgtggggaacggtggaaaacggaagaggaaggaggccggaacaaggcgcgccaaggctccggagccgtgccttccctgcgggcagaggcttgacccgcgaggggggcggcacaactccggagctcgtcggtgcacccactaatagatgaacagcatttcccggtacttggggagaggccaggaccggtcgttcaccagggtttctgcggcatcgacgctggttctcaatcgtgacatcgcggcaaggatgtcctcatggcagctcgtaagcgccgtctccagggtatccaggtcggatacgatggaatccagggcgtcgcccagcttgtccgccagcttctgcagggcggcggtaccgttggtccgcttggcttccagcgccctggagagcgcggcaacggtttgcccgtattcgttacgcagggcggggaggatgatggtggccgccatttcccaggacaggcgcccttcaatgcggatgcgtctgtggtattcttccaggaaaatctcaaacctggattccagctcccgcctggaaaagacgccgtacttttcaaacagggccacattcttttcattcaccagggtgtgaagggccgtcatcgtatttttcaggttggggaggccgcggcgttccgcttctttcacccattcttccgaataattgtccccgttgaagatgattctcttgtgttcggaaatcctgcgcttgagcgtttcctggagctgcggcaggaatgtttccggagcgaaggaggaaagttcttccgccagggaatcaagggattccgccacaatggtgttcagggtcatcatggggcccgcgcaggattgggcggagccaggagcacggaattcaaacttgttgccggtgaaggcaaacgggctggtgcggttgcggtccgtcgcatcccggggaagaacgggaagcgtgtctacgccgatcttgagcgtatcgttgcgcttgccgcagccggaagagccgttgatcatattctcaatcacttcattgagctgggcacccaggaagatggagataatggcggggggcgcttcgtttgctcccaggcggtggtcgttcccggcgctggccacggaattgcgcagcaggtcgctgtgcttgtcaacggcctcgatgatggcggtcaggacggtcaggaaaatggcgttctgctgcgggtccgaaccggggtccagcaggtttttgttcccgtaggaaatggaccagttgttatgcttgccggaaccgttgacgcctgcgaagggcttttcatgaagcaggcataccaggccgtgcttgctggcctgctggcgcagaacttccatcaccagcatgttgtggtcgatcgccaggttcacgtcctcaaacaaaggagccagttcaaactgcgcgggtgccacttcgttgtggcgggtcttggccgggattcccagtctccagagttcctgttccacgtcgctcatgaaattaaggatacggggcttgatggagccgaaataatggtcttccagctgctggtgcttggcgggaggggcgccgaaaagggtgcgccccgtctggaccaggtccgggcggttcaggtagaagttcttgtcaatgaggaagtattcctgttcaggccccagcgtaatggtcacgtgttcatccggaaggccgaaactcttcatcaatttcttgacggcattgcccaatgcctggcgggagcgcagcagcggagtcttcttatccagagcgtctcccgtataagaacagtaggcggtagggatgcagagcgtggctccgttcccgtgcctcttgataaaggcggggctggtggggtcccatgcggtgtagccgcgggcctcaaaggtgcagcgcaaaccgccggaggggaagctggaggcgtccggttcgctcacaatcaggtttttgccggaaaaactcatgatgggttccattcccttgggatccaggaaggaatcgtgcttctccgccgtggagcccgtcatgggctggaaccagtgcgtatagtgagtggctccccgttccagagcccactgcttcatggcgtgggctacatccgcggcaatatccgcgttcagcggaagcccgtcctggatagtggccaggagggtttttgccgtgtctttgggcaggtacttcttcatcacttccgtgctgaagacatccgctccgtaataatcaatgctgaccggagcgctctcgcttgttccgcccacgggcagggaagcgatggcgctgatggcttgtgttcgtgttgagtcactcatcatggttaactgttgtgccttttctccagcaagaagcgtgccaacttttcagataaactttcgcatgaatgtgctgttcattttaatatattgattattagttagatatggatatcctgacggaagggctgcaaaaaaaggaaaacagagctgcgaacgagaatggattacaaaaatgtaaaaccgcaacaaaaggatgattacaaaaatgtaaaaaattcttcttggaagaaaaatattttttattccgctgccaaatgacctgttgtgccggaagccgcgtcaggctctgtaaaacagggacaaagcagtttgaaagcgggaagatatgaagtgtggacaatattggcacggtttttgctgcaaataaatcagcttaacccaaacaaaacagcaaactgatgaatagcgatcaatttgagacaggcattcctgcgccgcagggattgtatgactttgaacaggagagggacgcctgcggcgtgggcctggtggctgacctgaagaatgaaccgagccacaaaatcattgaaatggggattactgtcctcaagaggctcatgcaccgcggagccgtgggtagcgatccggataccggggacggcgcaggcattctgctggcccttccggatgaattcttccgcctggttcttcccaacaagcttcccgccagaggcaaatacggagtagccatgatgtttggcggatgcggccatgaagaggaattggaagccgccgttacggaaaacggcggcagcgtgattgcgtggaggcaggttcccgtggaccgggacagcatcggcaaaaatgcccagcgcacgtgccccctgatccgtcagctgttcattgacggcagcggttttgcggaccaggcggaatttgaacgcaaactgttcgtgatgcgccgggaaatggaacggcgcgtggaaggctgttatgtgtgcagctgttccagccgaagcattgtgtacaaggggctgtttctcggcacgcagattgaaggattttatggagacctggccagcgagcatttcaaatctcccctggccctcgtccaccagcgctacagcacgaatactttcccaacctggagcctggcccatcccttcagatatctggcccacaacggggaaatcaacaccctgcgcgggaacctgaaccacctgagcgtgcgtgagccgcatttgtcctccaccctgttgggggatgacctgcaaaagctgctgcctcttattccccccggccagagcgattccgcctgcctggacaacatggttgagctgctggccgccgccgggcgggacttgcgccatgtcatgctcatgctcatgccgcaggcctggggcgtcaactaccatttagggccggatgtacgcggcttctttgaataccactccgccatgatggagccctgggacggcccgaccgccgtcgttttttccgatggtatcaatgcgggcgccatgctggaccgcaacggcctgcgccctgcgcgctatacgctgaccacggatgatattttcattctggcttcggaaacgggcgtagctgatattcccgcggaaaaagtagcccgcaaaggccgcctccgtcccggggaaatgatttactgcgacctggtgaaccaccggctggtatccgatgctgaaaccaagaatgaaatggccaggcgcatgccctaccgccgctgggtggagaaaaacaaaatttccgtccgttccctgtttgattccatttccgcctctgcggaaatgccggacctcgtgggccgccagcgccagttcggattcactcaggaggatgtggagctgattatccgccccatgatgctgaaaggcgcggagcctctcggctccatgggaaatgacgcgccgctggccgtcctctccggaaaggcgcctctcctgttcaattatttcaagcagctgttcgcccaggtgaccaatccgcccatcgaccccatccgggaggaactggtcatgagcctgactacatacataggcaaccatcccaacattctggaagaaacgccggagcacgcccggctgatcaagatggcgcgccccgtcattacggatgaagaactcaaccgcctctgcaatattcgggaggctggcttcccttccgccaggctttccatccagttcccggaaggcggggacgggaaagccctgcgggagacgctggaaagcctggcggaatccgccgtgggtctggtcaggtccggcgtgcgcattctggtgctgacggaccgcaacatagggcacggctaccttcccattcccagccttttggcctgttccgtggtgaaccgcgcgctggcggcctccgggctgcgttccgacgtagggctgattctggaaaccggggaggcgagggaaacaatgcactttgcgctgcttctgggcttcggggccacggcggtcaatccgtacctggctctggcgacggttacttccctggctgcaccgcaggactgccctctggatgtagtgaaagcctccggaaactacatcaatgccatagacaagggactgcttaaaatcatgtccaagatgggcatttccacgttgcgcagctaccgctcctcccaactgttcgaggcggtgggtctgaaccgggaactgattgacgaattctttcccggcaccgtcagccgcgtaggaggcataggtttggatgaaatagccgcggaatgcaaccagcgcgccgcgcaaaacgcggaacacggggacaagctggatgcgggagggcagtacaagtataagaaaggaggggagaaccatctctggaatccgcagacacttcaggctttccgcgctgccgtgcgtgacaatgacgaacggaaataccgggaattcgcggattacagcaaccgtcaggcgcagcatctctgcactttgcgcggcctgtttgaatttgctccggcggacgctatccccctggaagaagtggaaagcgtggattccatcttgcgccgtttcgtttccggagccatgtctttgggttccctcagcccggaagcccatgaaaccatcgccattgcgatgaataaaatcggagccaaaagcaattccggggaagggggggaagatgaagcccgctatgaacccaacgcccggggcgaagtccgctacagcgccatcaagcaggtggcgagcgggcgttttggcgtgaccattaattatctgcgccatgcttccgagctccagattaagatggcccagggagccaagcccggggaggggggccagctcccggcgcacaaggtggatccatacatcgcccggctgcgccattccatgccgaacgtcagcctcatctctcctcctccgcatcatgacatttactccattgaagacctggcccagttaatttatgatctgcgcaactccaatccggatgcccgtgtttccgtcaagcttgtttccgaggtgggcatcggcgcggttgccgcgggagtggtgaaggcccatgcggatgtggttgtggtcagcggccacgacggcggcacgggcgcctctccgctcaccagcgtgaagcacgccgggctgccgtgggagctggggctggcggaaacgcagcagacgctggtgctcaacaaactccgttcccgcgtccggctccaggtggacggccagctgcgcaccgggagggacgtcgtgatggccgccctgctgggggcggaggaattcggtttcggaaccgccatcctggtctccatcggctgcgccatgctccgcaggtgccacgaaaatacgtgcccggtaggcgtcgccacgcaggatccggccctgagggccaaattcagcggcaagccggagtacgtcatcaactacctccgcttcgtggcccaggaaacgcgggaaatcctggcttccctggggcttcgttccctggatgaagccgtaggcagggcggatctgctttccgtaaaccgcgccatagatttttacaaggcccggcatttggacttttcctccatcctgcatgcggcagagggggacggacgcaggtttgacccctcttttgaaaaggaaccgctggacaactacgaccgccgccatctgctgccggcattaaagcccctgctggaaaagggggaaaagacggaactctgccgcgacgtccgcaatgtggaccggacggtagggacggaactttccggtgagctggtgatgaaattcgggccgcgcggcctggcggaagatacgcttacggtgcacttcaccggatgtgcggggcaaagcttcggggcttttctggctcccggcgttacctttgaacttgtcggggaggcgaatgactttgttgggaagggcctgtccggcggcaaaatcatcgtgcgtcccccggatcatatctcctacgtaccgtcggacaacgtcatcgccggaaacgtcatcggctatggggccacttccggcagcatcttccttcacgggcaggccggggaacgtttcgccatccgcaacagcggcgccaaaatggtggtggaaggcattggcgaccacggctgtgaatacatgaccgggggccgtgtggcggttctcggcaaggtgggcgtcaatttcgccgcggggatgaccggcggcctggcctacgtgtatgatgcggacaacaacttcgatcagaaatgcaacctgggcagcgtggacctggaaacggtcatgccgcattccgccgatgaagcggaattgcttcagcttatttacgagcattatatggctaccaggagccgcagggcttacgacctgttaaacaactggccggaagaacgcggcaaattcatcaaggtattcccggtggaataccggcatgccctggccatgcattcctgaaagaagcatgcagcagttttctgttgtttggggtaaggcaggggcctccgcgggtgcggaggcccccattttttcaaaggcctgcctgctgtttcatggccgggcattttggcgccgcttttcctccttgagccattccgcatttgaagctggcaatttgcctgtccggcggcatttcggaggctgttccgttcgtttgccggataacggccgttccggccgccgggcatttggagacgaatgttccggataagaaggtttttatgaccgtgctgtcagttgataaagaaatgcagctgcatggatggggatggtagttgcggttgatgtcaggaggaaggtcaaatgttccggcaatacccggttctgagcggattatgaattcgaagtcaacaggaaagtttgaatggaaatgtgttagtggagttttggttttggaaattcggctggatggcaattgataaaaaagtgaattgaaaggtaactgattggtattcttgttatttagttattcagggaattgccgcgaattcataatccgttaggtttgctccagtaggtgtttggcattttctgccaagctgctccaattaactacgcaatgaatatatgacgaggaaaaccggccctctccaggtggagagggccggttttttgaggaaattctgtaagggagttcctttccctttttgaggcttgcgccggcagaatattttttcctgcgcctttccatgaaaaagtgcggccgcgggggcggacgcacttgcggagacggaaggcagagcagggattcctactttttaggcgttatattgcgcatgttgcggcctttagctttgcgctgctgttcttccagggccgcacgctgctgctccatcatcttttggaaaaagcccgactttttctttttggcgggggaaagcacgggcatgggcaagcgacggataagggccgtttgtcctatggagatcaaattctgcgtggtccagtacagggccagggcggaagcgaaattataacagaacaggaagaacatcacaggcatcaggttcataataatgcgctgggagcgttcccccgcctgaggcgtcatcctcatctggataatcatggttacggccatgatgagaggcagaatattgattggaacgccgaacaggtggcccacggtatcaggcagggaaaggtccgtcatccacaggcagaagggctgccccctcagttctgcggaatactggagcacacggtaaaaggcaaagaaaatgggaatctggataagcatggggacgcagccgctggccgggttgatgccgtatttctggtacagcttcatcatttccatgttcaccttctgagggtcgtccggatatttctccttgagtttgaccatctccggctgaaccagggacatgcgtttcatggccatataggattttttgtgcagcggccagatgagagcacggacaacgatggtcatgcagatgatggccacgccccagttgccgaaccatccgtggaagaggttgagcagccagttcatcggaacgctcaggaatacgagccagccgtatgccatgatatcgctgatggcgggataggaaagattcaggtcacgcaggtaggcgttgaatttggggccggtgtaaatatcgtaggtgagcgtcttgatttcattgggggccatggtcagattggggattcccatggccacggtgacgccgggcaccagggtgttgccttcatgcgtcaaaggaaattcttggcgggtggcgtacacggtggaccccctggactggtcctggggaagaaggatggtggcgtaatactggctcatgacgcaagcataagtcaggtcctggagagggccttccaggacgcgggccttggcgctgctgaaaaagccgcctgtgaaataggaaggcacttcctgttccagggagccgtctgcatggtaaaagaaatgggtgtaggtatcttttggctcgcttttggcgatgggataggcgctcccgccgaagatgcccatgtagcgcagatcctggacattgggagatttattgagcagggagacggtcaggcgaatgagatatttgctgccgggcaatacttccccttccagatttttgacggggtgcagggtgtacgtttttgagatgaaaagctgccgtgcggggtcataaccttccagggttacggagtccgccgtgcgtttcacttccttatacacggtgttgtcataggaaggatcctgggtggcatccatgttgaaaacgagttctccgatgccccgttgctgggcttcgttaatcgtgatattatggtccgcaactttttgggagtccacgatatcgttgtgcagggtaaccgtgccgatggaaccccctatgcggttgaacgtgtaagtgatgaagggttcctgcctcccattcacttcctgcgtggctaccagagtgatcggggcggttttgtcttcttcaagggctttgttgacggaggcctgttccggggcggaggttccggctccggggtggacgcaagcaaccggggcattggctgcggcggcagccgcctgcggtgcgggaatgggggcggtttcagcctttttattgttgcccatgtaaatattcaggcccagaagggcggcgcagatgcctatgatgatccatgctgtgcgatccataatgtgatatagcttgattggagttggtgaaaggaaagggaaagaaaggtaattgttcagcgtgggtggcgcgccgggggcacgggatcataacctgatccgccccacgggttgcatcttaaaatacgccatgtgccaagaagaaagccgcgccaggctccgtggatgtgaacggcctggatgaagtactgggaacaagtgggtgtatagcggcagccgctcccgggcccccccagggcatgcaggggagcgctgatgaaggtttggtatcccttcacaagggtgatgagcagccatttcatcatgtcttgtcttgttcccgggaaagaagttgcaatttaagttttcgggcggctttccgccagtcccgttccaggtcggcgtagctggcttccacggccctccagcggaggacgcacaccaggtgtacgccgttttcaaaaggagccccgtgcgccctcagtatttccctcacgcgtctccgcagtttgttgcggacaacggcacagccgatttttttcgtacagatgataccgaatttggagggttcctccggatgttccaaaggggctgcgcttaaaacaataagccgacctgctacggatggcccctcgttgcgtacccgggcaaattggaatgccctggtcatgctttgttgacgagtaagacgcatctcccgcgggtcggcccgtgaaaagaagttccaaggaggcgttaaccggatcctggcggctggattaacggccgtgctggatggtgtggcgcttgtactggatttcggctcccttgggaagcaggcgcttgcggcctttagcgcggcggcggcggatgatgtccgctccgttcttggtggccatgcgtgcacggaatccgaactgacgcttgcggcaacgcttggatggttgataagtcctcttgctcatgatgttgaaagatgcttcttgtgaattactagattcagtgccgtccgtctaagcggcctatgcacaaccggacggaaaggataactattttgattgttttgtcaatccgtcaggcgattaatttgccgtttttcttgcggaaagcactgggataagtagtctttatgattgatagacagtgtttttctatttcagaaaagcccgcctgctttacagaaagagcagttccgcgtatgtggggacgggccacaggtctgcgtccgtcaggctttccagcatatcaatggtgcttctcaaattgtccatgcccgtctggatggccctggtatcggcttcatccacggcgcggcgcagttcccgcacctgtccggggagaatatccagcagcgtgccgatttggttggcgcgatccgtagtagctttcattcccgccttgattccggatgccttcatctgggcaatggcggtggtaagctgcgtgagctgttccgttacggcggggatgtaaagggtttccaccatcaggagggccgtttccgcttcaatgttgatttccttgtggaatatttccgtctggatttcatggcgggcgtggagttctacggggctgaccactttgtacttttcaaaaagcgccttggccttgggcgtttccagagcggccagggcttcaatggtgccggggatgttggggaggttgcggcgttccgcttcctctacccaggcttctccgtaaccgtccccgctgaatagaatgcgcttatgcttcttgatgatgttttgaaggagcttgttgagggtggcgtggaactcctcgggcttgtccttgacaggttccaggatggtgcagatttcatccaggctttccgccacaatggtattgagcaccgtcatgggccatgcacaggtttgggaggaacctacggcgcgggattcgaatttattgcctgtgaaggcaaaggggctggtgcggttccggtcggaggcgtccagagggaacatgggcagggtgtccacgccgatgttgatggtcttttgggtgcgcgcttttttagtgcctcctttctcgatttgctcaatgatttcatccagcagatctcccaggaagatggaaatgatggccgggggggcttcatgggcacccaggcggtgttcattgccggatttggcgacggaggcgcgcagcagatccgcatgttcgtccacggccttgatggtggcgcagagcagagtgaggaagatggcgttttcctgcgggctggagccgggattgagcaggctgccgtaaccgggggcggagagggaccagttgttgtgcttgccggagccgttcatgccggagaagggcttttcatgcagcaggcagaccatgtcatgcttgttggcggttttccggagcatctccatgaccagcatattatggtccacggccaggttctggctttcaaaaatgggcgcgatctcaaactggccgggagcgacttcattgtggcgcgttttggccgggatgccgagtttccagagggcttcgtccacgtccaccatgaattccagcacgcggtccttgatggagccgaagtagtggtcttccatctgctggtgcttggggggcacattgccgaaaagggtgcgtccgcacatcatcaggtccgggcgcagggcataaagctgcttgtccaccaggaagtattcctgttccgcccccaggtcggcactgacatgaatgttgtccggaccgccaaagcaggacaacagccgcttggcctgccgggtgacggcagtcatggatctcaggagaggcgtctttttgtccagcgcctgtcccttgtaagagcagaaagcggttgggatgcaaagcgtggcgccgttttccgtccgtttgatgaaggcggggctggtggggtcccatgcggtgtagccgcgtgcttcaaaggtggcgcggagaccgccggaagggaagctggaggcgtccggctcgccctgtaccaggctcttgccggaaaatttgagttccagatttccctccgggtccacgtccacaaaggagtcgtgcttttccgccgtgctcccattgagaggctggaaccagtgcgtgtagtggctggctcccttttccagagcccacgtcatcatggcctgagccacttcattggcgatgtcggggtccagtttttcgtccttgcggatggtagccagcagttttttgtaaacggggcggggcaggtaattgcgcatggtctccatgttgaagacatcctgaccgtaaatttccgcaataaaggttgcggcgttgccaacatcggaaggtgggtttgtatgcatcttgatagggaacgcgccaaaaggctcggaacataccaaaccttaaaagagactttttggcaagccgaatcctgccctatttcttcaggaaaaggacttcttccgcccccatccgttttcgggaagaagcgtaaacggttttccggtttttatggttctccggcggcaatggagaaattggggaaggagggggacgctgtaaaggaagggatgggccgtgattgtcgggaagagggttggacgggagttggtgaagtgccgggttttttgtttcatgaaacagcgcgggtgcctgccgatcggtattttcccgtatcttgcaagaaatttatttcgttttcagtagtaataagtacaaccatattattgtgaaatgcgttttctgttaatagcaagatgtttattgttgatgatgctgtgttgtgcgggagcggggatgcggcttcatgcccagcctttgaataagggccggattgccattctgggtgatagtattgcttacgcgggccattgggccaatgaagtggaaaacaccttgagggacgataaaaaatttgcagcctgcgagattgtcaactttgccgttcccagcgagacggtagccgggttgagcgaatatggtcatgcgggcggcagattcccccgtccatgcctgcatgagcgcctcaaccggattctcaagatgtaccagcctcaattgattctagcctgctacgggatgaatgacggcctcatgcaggcgtttgacaaagcgcgttttcaagcgtaccaggaagggaatatccgccttaaaaaggctgccgctgcggcaaaagcggagattgtcttcattactcctccattgttccggggggattccgctgaacaggctgagtacgacgctgtattggacaagtacgcggaatggctggtttctaaaagaaaagacggctggaaagtcatagatatccgtcccgggcttcggaaactcattgccagagagaaggctgggaatcccggtttcaggtattccggtgacggcgtgcaccccggtccggaagggcatcatatgatagcccgggaagttcttaccgggctggtcccggaaataggccttgctcctgaggttgcggaaaaagaccatcggccgacgccggatacgatgaaaaaacatgagaaagtccgcaatgaatggctggtaaaaacaggacatgcacggccggaaattccggggtatgatccggaaatggccaagcgtcagtttcctaggacggtttctgtctggaatggttttttacgggaggagtttaccgtgggcggccgcagggcattcatcgtctttcccgacaaggctgttgtttctggaaaagaacagttgtggatatggcggccgcaattttttgattataagcctatagcagatctcgaactggtaaagcgcggttatgcggcggtatttatcagcatggaagacctttacggttctcccaaggccatggatgtgatggatcaattttacaggtatctggtggatgaacgcggtttttccagaaaaacggtgttgtttggactgagccgtggaggcctttatgcgcttaactgggcggagaagaatcctttgtgcgtggctggcgtttatgtggatgcccccgtctgtgatttcaaaagctggccggtaagcaggggcaagggcaaaggttcgccggatgactggaacaaatgcctgcgcgcctacgattttaatgaacagcaggctttgtcctataaaggtaaccccgtggacaatatgcgcggcatggctaaagccggaattcctttgttgtttatttcccggacggaagatgatgtagtccctattgaagagaatacggatgttttcgctaagcgttacgccgggatgggggggcctgtaagagtcatccgccggtccggagggcatcatccgcacggttttgacaatcctgcccatatcgtagattttgttctttccgttaccggacagcccgtccccttgcgcgttgcgtgcctgggagacagtaatacttttggagcaggagtagccggagccaataaggatgttttgcgctggagccatcttcttggtcaggaattgagggaaaaattcaaacggaaagaaatagaagtgctgaactgcggcgttaacgggcgtacccttctggccaagggagaccttccctatattaaaacgggcgagtaccggaatgcgctcaattctcatgcacagattgccattatcgcgttaggcaccaatgacgccaaaccgcagaacaggaaattcctgtccgagtttaagcagaattatgccgccatcatcgccgaactgagggaaaacatgcccggtattcaaatctattgcgcaattccgcttccctcgtggcaatcttccagccaaattgacaaggaaacggtgaaaaataaaattgtccctcttgtgaagcaggttgcgaaggacaataagtgtaaaaccatcgactttttcaccccttttcaggataaaccggaactttttcccgatggcgttcatcccaatgccgatgggcaggtgattatggctgatgctgcgctcaaggaacttctgaagaagtagttttttaatttaatcaatacggaataaatgaacgccagactatcggcaatcacaggttcgattctcctgctgtcgtccccgctgcagggattttccgcaacaactcatccggattcctacatgaaccgggattggaaaaaagagattcccctgccagtatatccaaaccgggaaatgacggaactttatcaccaaacatgggaaattgcggcagggcgcgtcaggaaagggccggaagggctccccgcgtctccctatatggatgaaaattgctacgaagatcaaatctggatatgggacacctgtttcatggtgctttttgccaagtatgcgcccagggcgtttcccggaatagaaagtctggataatctttacaaacctatccatgaaaaagccgctacgccccttagaatccatttagtggataatcccccgctgtttgcttgggtggaaaaggaatattttgatttcacaggagataaggggcggctgaatcatcttcttaatgaaaagcggtatttgcagaagcatttcaaatggtttgcccgggctaaggctggtgaacggtttgagtgttccccccagcgtatttacttgaattccattggggatgatggctttacctggacggggggagcgagcggaatggacaatactccccgcgggcgtgatgccggaggataccataaggtgctatgggtggatgccatttcccagcaggctcttagcgcccactgcattgctgccatggaacaggctctgggaaatgaggatgaagcaagaaaatggaacgctgaatatgaagcgcttaagaaaaagatcaaccatctttactgggatgagcgggatggattttattacgatgtcaccattgcggacaaacagccctgccgcgttaaaaccattgcttcctattggccccttctggcccggattgcgtccagggaacaggcgcggagcatggtaaatcatctgatgaatcccggggaattcggaggcagttatccgacaccttccctggcccgctcggataaggattatcatcatcaaaccggggattactggcggggtggaatttggctgccgacgacatatatggcgattaaggccattgaaaagtatggctaccatgaggaggccgatgctattgccgagaaggttatcaaccagcagcttgccgcttacaggaatatggaaccgcatactgtctgggagtgctacagcccaagcggagatgctccctccactgaacacggacgccgtgtaagaccggaattttgcggctggtcagccctggggccgattgcgttgttcattgaaaatgtgctgggttttaagaaagtgtccgccgccggaaaggaagtccggtggaggttgaaaaaaaacaagggccgccatggaatcaggaatttgaggtttggcgatattgtaaccgatattgtttttaatggtgaaggcacggtgtcggtcacgtcgaatgcttcttactctctaatcattaatggcaatacttattcagtaaggaagggggatactgaaattaagctgtaaggaccttctgtttatccacggaagggcgtcattgatgttcttccgcggagttttttccttttgccggggcaagatgcgggtttttcccgtgcctgcgccaatttttttcttttggaggcggcctgagaggcaagggtgacaaaggaaattccggaagggcggcaaggcaatgttccggaacattacttgagaggtaatgttgtctgccgttttaacggggagggcaggcttcctccatatgccttacggaaattttttggtaaagggtatgggtttgtccgggggcgagggaaatggaacggggctccgcgtttcccgtttcaatgcacaggaatttattccaggactccgcacccaggtccgccatgtttttggcgccctgttgtccaggattccagacgatgacggaagaggcatggttccgctccaccgtgatggcgcggttcagcatgaggtcttccagcattgtttttcccgaacaggagggtaagttgtaaacgcggtccagacaccccagcggcgccagcgggcgttctccgtgcttcatgggctgggcggcttcttcccggaacgggatgtcctccagcccatgaacgcggcatttggtcaggttgccgacggcaaagtagttgtggaaggcttccgtgagcttgcagggctgcgtgcgcgccgtggtttccagcttcatggtcagcgtgcggcccagggtaaggcgcaggatggcggcgggataggattcatcttccggatagaaagccagggagagcaggacgttgccgcgcttgtccatttcctggtggtggaggcgccattccgaggtgcgcgctatgccgtgggacggtgctccttcccgggggccgaaccagggccagcagacagggatgcctccgcggatggctttgccggggacaaaagctgcgttgggagaaagaaaaaggcattcctcatgccctgctggcttccatgaggtgaggtgcgctccctgaaggcacagggatgccgtgcagagcggtgttgttacgtccaggaaagaaagcccctggtttgttgtgcgccggacggtcatggctgaaggcgttcaattgtccaggagccgttttcctgaagtttgtacatgaaacggtcatgcacgcggccggggccgccctgccagaattcaaaggtatccgggataattcggtagccgccccagaaggagggaaggggtatttctcccttggagaatttgtttttcagttccatcaacttcatttccaacagttttcttccggagatgacggagctttggtgtgaaacccaagctccaagctgggattccttggggcgggtgaggaaatatttcagggattccgcgcgggagactttgacggcttttccgtaaatgatgatctggcgttccagcattacccacggaagcatcatgcagacctgcggattttcttcaatatcgcgggccttgtggctgccgtagttggtgaagaaaacaaagcccgtccggtcaaaatatttgagcagcacggtgcgtagggagggcctgccctgggcgtccgccgtggccagggaaaaagcgttgggttccggaatatccgctttcagggcctgttcaaaccaggtttggaattgttcaaagggattttccgccaggtcctttctgtgcagctggcctttgaggtattcttctctgaaattggacaagtccatggcgtgttgaacgatgaggggttattctacgctgaaatccagccccaggtccagggagggggccgagtgggtcacgtagcctacggagacgaagtccacgccggattccgcaatggcggctaccgtgtccagatgaacgcctccgctggcttccagcaggggggtggtgcgtcctccgcgcatggcgacggcttgtttcagcatttccggcgtcatgttgtccagaaggatatggtccacgccttccagtttaaggaagttgcccacctgttccagggtgtccgcttccagctggatttccacgccgggcttttcctgacgcagcctgttgatgcattcctggaggtgttccgtatttccatccgtcatcaggtggttgtctttcaccatggcgcggtcataaaggcccatgcggtggttggtgcctccgccatggagcacggccgctttttccagcagacggtagccgggagtggttttgcgggtatccagaatgcgggcgctggtgtgggaaatggctttcacatattgtctggtgagcgtagctactccggaaagacgctggatgaagttgagggcggtgcgttccgccccaagaatggagcgggcggaaccttcaataagcatcaccacggcgccgggtgccacggcttccccgtcatgcaggtaaacttccaccttcagggtgggatccaccttgcggaaaacttccgccgcgacattgacgccggaaagaacgccttttttccggggggtcaaaatagctctggctgtcagatgttccgggacgaagtatgtggaagtcacgtcgccggagccgaagtcttcggccagcgccagattgatcagggtttctacgttgtcggatacggtttctgcgggcatgaaagaaaagcggcttaatattcgcggttaagaagatagttggccagttccaccaggcgggcgcggcgttcttccgggaagatcatcagggcatccagagccgcctgagtgcggcatttggcttcggaacgggcgccgtccaggccaatcagggccggacaggtggatttctgggaattgacgtccttgctcgcggtcttgccgagtttttccgtggaagccgtcagatccagaatgtcgtcaatcacctggaaagccagccccaggttgtaaccgaagtccgtcagagcttccagctgggactccgtggcgtttgcggacatgccgccgaagcgaagggccgtggttagcagggcggccgtcttcccttcgtacacggtgcggacttccggttcggagagctgcttgtgttctccctccaaatccagaatctggcctccgatgagcatggtgctgccgccggtggctgccagctccctcacgtaatccctgacggtatagcgttccgtatcgtccacctgggcgattacggcaaaagcctccgtcagcagcgcgtctcccgccaggatggcgacgccttctccgaaggccttgtggctggtgggtttcccacggcgcagatcgtcgttgtccatggctggcaggtcgtcatggatgagggaatacgtatgcatcatttccacggcgcaggcgggaaccagggcgtccactgccagtcctccgcaggcctccgccgccgccaggcaaaggacggggcgcattcttttcccccccgcaaatatgctgtagcgcatggctttgtggatggtttcggggctttcgtcctctgctggcagcagtctgtccagcgctgcgtcaatcagggcgcattgttctgtgatgtagtcgttcagtgattgttcacacatggcgttatggaataggtgcggggtgtggaggaaacaggtcagcggttgaccagcaattccgcgatttgtacggcgttgagtgcggccccttttcggacctgatcgcccacgacccagagagtcagggcattgtcaatcgccatgtccatgcgcatgcgccctacgtagcaggtatctccgttggtgctgtccagcggggtgggccacacgccctccgctgggttgtccatcagggcgactccgggtttgccttcataggcgctgcgggcagtttccaagtccacaggtttttcaaactgggcggtaacggagatggaatgggaacggtaaacgggcacgcgcacgcaggtgcatgttaccttgagttcgggcagggaaagaattttacggccttcattgagcatcttaagctcttccttggtataaccgttttccgtaaaggaatcgatctggggaagaagattgaaggctatctggtggggataaacatttttcactacgggatggccgtccactacggcgcgcacctgggtttccagttccgcaatgccgtgctggccgctgccggaaaccgcctgataactggaggcgatgacggttttcaacccgaaacgctgatgcagagggaagagggccatcagcgtaatgatggtggtgcagttcgggttggcgataatattgcgggggtggttgaaggccgcttccggattgatttccggcaccaccaggggcacgtccggctcctgccggaaggcagaggaattgtcaatgaccacacagcccgctgccgctgcgataggagcgaatttcagggaaatgcctccgcctgcgctgaacagggcgatatccaccccatcaaaggatttttccgtcaattcttccacagtcagcattttcccacggaaagcgacctgttttccggcggaccgggcggaggccagaagcttcagggaacctacgggaaaattgcgtgtttccaggcaggacaggatttcaacgcccaccgctccggtggcgccgacgatggcaacatggggtgcttggttcatgattgttgtcagaaaatgacggatattttccgtccgcccccattatacggcagcccggtcatatggcaatacgattgcaagccttcaggcttaaaaatgaaaaactgtccgggattttacaccccggacagttgttgaaaaacgggaaagatcgcgttttttatttcagcgcttgcggcgcagcatcagcagggacaggcccaaaaggcccagggatgccgtagccggttccggaacgacatcctcagcagtggctgacatggaaaaaagcaggttggagttcgtgtttccgccgccattgcgggtggacatcacaatgtaagccgtgtcgctggtaaggggagtaccgctcaagtccacggacagggtcatgcctgtttgaatcagggaagaggcctggccggtcaactggctgatctgccagccttctgccgtctgataaacgatattgagcgtcgtgaagtttgctccggattgcagcccggcgcagtccacggaaagagtcaatccggtatagctggcgtaatcactggtaagcgttaccgctgttcctacgatagagccgccgtaagcatttctgttgatgaaagacacggatacatcagtatccccggatgcggtgacgctgccgtaaataccggagccggaattgccgtttgcagtggtgccttgccagccggtggtgccttgcaaccatgtgacgactttttgtgcagtgatgacacttccgctgttgacgtctccgaatccagacaatttaaggtttgtaggcagagatgccccttcggctgcctccccatttaggtcgattgctacggtggcggccattcctgcgccgcaacacaaagccataagaccggaaagaaataatgtgttcttcatggttgttcgttgctcttttttattgctgtaatttgccgggctgtcttgaacccgctcatgatgaataaagcggattttcaatccgatatgccctgaaaacagtgcatgagtttctctttctgcagggtgcggactgtttcctgcggctgttgaaacggacattcccggcagatgtaccagctttcagggaaaagagttctccggttttcagacttatcttgagcagtctcaaaagctggcggcggtttctgcacgggtggatatttcggcaggctttccgtatgcataaaaaggttttcaatgatgcaataaagttcggcacaaattcttggttatcagaatttacgcttgacttccggattgaaaatccggcatatcctcactttccatgaaaggcaacaaaacaggctcccgattttagggagcctgtctttaaaggaaagagcggtgcaagcctgctatttaacccattttcccgcgccttccggcagcctgccgtcagagacggggccgtagcgggtggattccgtgttgccccagagggggacgcctacgatgcgtttccaccagcgggacatgctggctcccgtatagcagccgaagctccagcagtcggactgcggcgtgaaaatatcccgccgtatcctgttcaggtccgtctcatggatccattccgtggaaacggccatgatattgttgccgtagtccagcatccacgcatagcagttggaatggccgaagtagtaaaaggattccaccttgtcgccgtggaagcgcggggaggaattcagcgcccggatggcctggtcggcgctgtttacccaggcgagcctgattttatacttggaagccaggtccgcaatccagcgggtgtaaggttttccgtcttccttcccccgggttgcgtaaccggggcggtaaacaatccaggtgattctggcggcaggatcttgctgctggatctgggcgatgcggatggtggaggcccttacaaagttggcccaccagttgtcatgcctgtcaggctgtattctcagcccttcccattgcctgagtgcggggccgccgcacatgacgacgtgaacggcccgggacagtcccgtgccgcccagcaacaggaccagagcgagaaaaaggcgtgaaagcatgcccgcaccctacctttgctccccgtatctgtcaatccggcggagcgttttttgcgggaacagacgcgcgtgaaaagacaagggaggggggtcatgtaccctcagcaattcaccacgttgacggccaagccgccctgggcggtctccttgtatttggattgcatgtcccttccggtgtccagcatggtgcggatgaccttgtccagcgggacaaaatgagcgcccgtgccgcccagggccatgcgggcggcgttgatggccttgatggcggcgatggcgttgcgctcaatgcagggtatctggacgaggcccgcaataggatcgcaggtgaggcccagattgtgctccatgcctatttccgcggcgttttccacctggtggggtgttccccccaggtactccgcaagagcggcggcggccatggagcaggctacgcccacttctccctggcagcctacgtccgcgccggaaatggaggcgtttttcttgtacaggatggcgattcccccggcggtgagcaggaagcgatgcacggcatccggatacggggaaacgcagaatttggtggcgtagttaagaacggccggaacaattcccgccgctccattggtcggagcggtgacgatgcggccgcctaccgcgttttcctcacttacggcaatggcgtacagattgatccagtccatgatggagagagggtctttcaaggctgattctccgtgcaccagaagattcttgcgcaaagttttggcccggcgcggaacctgcagaacgcccggcaggttgccgcgcgcgctcatgccgttggagatggactgcttcatcgtcgcccagatcaggtccagtttttcacggacttcccgttccgggagcatggcgcattcgttcgccatgacaatggaggaaagagggcatccgcgctcatcagccatgtgcagcagttcctccgcggattcataaggaaaaggaaaggtttcccggtccctttcttccggatgcagaagttcctgttcggaagagacgaacccgccccccgtggaataaaataccgcgtcttccaccgggtctccgtcctggttgacggcagtgaactgcattccgttcggatgcaggcgcaggggctggtagtgggaaagatccaggtcgcgggaaggagagaagcggacgtttttttcttccgtgacggacaacatttcctgctggtgcaggcgggcgatttttccgggaatgctgcgcggctccaccgtatggggttcttcccccagaagccccagcatgatggctgtgtctgtgccgtgcccatgtccggtggcggccagggagccgtagcattcgcagcggatgcctgagatttccgccaagcgcggggagtggcgtatctgttcaagaaagcggtgcgccgcccgcatgggccctacggtatgggatgatgaaggacctatgccgatgctgaaaagctcaaaaatgctgtaatggtgcatgtccgttttcctgtagcggggaagggccggaaatcccgctgggaattccggcccgttccgaaagatgggtttacagccccagcaggtagcgttccgcttcaatcgcggcgctgcagcccattccggcggaagaaatagcctggcggtagtgaggatccgccacatctccggcggcgaacaatcccggcgtcctggtcgccatcatccctgtttcccggataatgtagccggcatcgtcccggtccaccagatcccccaggaaagaagtgttcggcgtgtgcccgatcgccataaagacgcatttgacgggaagttccgtttcatccccttctactacgtccttcagcatgacggcttccagttctcccttgtcgtccgtcttatagcttacgatggtggaattccacatggggaaaatcttttcattggacagcgttcgttccgccatgattttggaagcgcggagcgtgtcgcggcggtggatcaggtacacccgggaagcgaagcgcgtcaggaacatggcttcttcacaggcgctgtctcctccgcctaccacgcacacaggcacgtcccggtaaaaagctccgtcacaggtggcgcaggcggtgaggccgtggcctaccagcccttcctctcccggtattcccagatagcgggcggatgctcccgtagccacaatgatactccgggtttcgtaattctggccgctggtcttcacggtgaacagtccggtggcttcatccctgacgacgcttttgacgtcctcatatgcaaaccgggtgccgaacttttccgcctgctgctgcatcaggaacatcaggtccggccccatcacgccgtccggaaagccggggaagttttccacttccgtcgtggtggtcagttgtccgccgatttgggaacccgtgatcagaagcggagagagattggcgcgggcggtgtaaatggccgccgtgtaaccagcgcagccagcaccgatgataatgacttgttcgctcataatagtatatatgtccgttgccatggtaaagggcccgtgcccgttttgcgagtagattttgcgctatgcggagacaatgcagcggcctgcaatccggcggttgcgggacgggttccggcagtggcggaaaagagctgtctgcatgtatcccaggcgacggtctgcaatattctggccctgtctgcgggaagattgctcagtcgcgtccctttcaaggacaagcggcccggcagacccagcggagactttccgaataacgtgaagtagattacgcatgccgtcaggtagctcccttcctccgtcgggtgctagccgtcaggctggtacagctgaatgcctggatggcgtttgaggcaattctcccaggcaatgcccacgggggcgagcgctgctttttccctccgggcaagtttcaaatacgtttcaagaagagccttttgctcctgcgggtccggagttccggaagctcctcttttcccccacgtcagcatcaggatgggcgttcctttggcggctcgtatcagagagcaccatttttctccgaactccatggttcgttccggagcccggataggtgtggcgctttggtcctggagaataacgaagtcccatgccgttccttccatgttgctgcgggcacgcctgtcattccaatgggactggagggatgctgccggagccgcgtgcatgtgcacgtccggccgcaatcctttggtatctgccatggctttaaccatggcgggcatgcggttgaaaaacgtatagctgtttcccagaaagagaatacggctgccggggcgtgcaggaacacagcacggccaggagggggatgcgggcggctcttcccgggcctggagagggcgggggaaagctgcccaggaaaaaatcagcagcaggaatatcttgacgggcggcatcatggctttagacgggttcccatgtttccggaataaaatttcaaatggaattcatgacgtgagcaggctctttctatacatcaggcaaaagtaaattcatagagataaaagagaacatggaatgcctttgtttcggcatcccttgtacgggtgccgaggctgccgtcagtcccggcaggcagacggggatttccttgtctccgtatcgtcgcgcgaaggtatttttcttccttctccttgattgggaagcactgcatcaatttaagcctgaacaactggttgtatgactggggaaggctttccggaggacttgccgaaaggagacgggtgtggttggatatggttcatgaagtctgagtcgctgaccaagcgccgtgtggcgggtgtggatgatccgctgttcctggattctctggatatttaccggacaagctttccggtgcatgaacagcggcggatacaggatttcccgttggcgtttcaagaccccggtttttgttatgaagtatttttaaatggggaaggccgggtggttgcgatgctggtgacgtggcgtcgggaaaaattcgtgtatctggagtattttgccgtggatgcctccctgcgcggccagggcgccgggcaaaggattctggaagaattgagggatgcgtttccgcacaaggttattttggaaattgatcctccggaggacgggatctcacgccggcggctggggttttatcagaggcacggctttgtccccaatccgcagtttgattatatccatcctccttatacggatgagggtgaacctttcccgctcctgctgatgacgcatggagatttgctggatgaggagacataccggagctttgtggatttccaccatcgccacgtagtggcgaggtgaatgaatggccggggaaaatccgcgccatggggggattttcccctcttgaagcaatttatccttgggggggccgatatgagcctgtaggacatcaggctcatgttgcggttttgcctgtttgtggaacgcccctgagtctgtattttccgaatcagaagagccgttccgcatttttgggagacggctttttgaaaaatgcagcgggttgggatataccggaagactcagctccatgcccggttcacggcttccctctcttcctgggcaagatatctggagagccgttctcccatgcgcagcctgtattcgggaatactccaggaatggagcggctggacggcggaattggtgaattgccaggaggggacgggaacgaccacgtccagcacttctccggctctggagggcatcccggccagtaccgccgcaatggtggaggtaagctccggatgttcatccagaatatccagcagccatccgcagcccaggtccgtgggaatggcctccgtttcggccagcaggtccgcgaggcgcccgggagggagatttttggaaatgaaagacagataaggggcaaaccgcatgtctcccaggctcatcagggcgtccagcgccggagccatggacgcctgtccggagcagggagaggcgcagatgacattcgccaatccggcaattccgggaaaccgctcctccggttggggcgcggccagcgtataaataaggaaagcggattgcctgcgaatatccggcgcctcatccgtcatggcaaaaggcagcagggccctccatccgtcccctttgcgctgccggataaaagctgccagttgcagagcgcatttgcggcgggcgtccggagcgcagcgggattggaacatattgtaaatggtgacgccttcttcttctcttcccgtttcattgcaggtgaccagcccgtaggcgatcatggccagaggccattgatccgaaccgatttcccccctgcgggagggatccgtgacgagggcggcaagccgcttgatttccgacaaagagctggtttgatcctgaaaaaggcccatgcccgcatgatagccggaggcgaaaacctgccaaggaaaaaccgtggactgcttacaggaacccggagttttccggtgaacgctgttgaggcatgttgttgagtgtgaccggcgttttatcctttatttattggcattccggctcacgttcggacaggagttccgtattttttgatgaaattttttcctgtgttcttccccgcttttcccctggtagaggtaggcggttttggagttgtatcctgccgttcggtcgatgaggtcgagaacctcgccgtctccgtatcccgccttcctgatgtatttgacgacttccccggcctggtcggggaagtacttcaccagcatggagatgaatcttttctccataattctgataacataagtgtcaagcatctgattccttgatgagaatgtaaccaggttattccatttgtgagtccattcgtaatctttgatgtcatttccaatatccttggctgaagcgtccatttcagattgatgttttatgggagaaaagatttcatgatatagtgattcctcattcttgtggaaatccttgatatgcattttttttatttttttaataatgtttgaaagaagggatatattaaaatgtatcaattttcttttactgatctttaatgttgttgatatttgatttatatccataagggaaatcgctgtgctgatccttgctttgctgtaaatatcattatttttctcgtttttataaggccatggttgatcactggtgtaatccggagcttcatacatgggggccccgcctatcagataaaggctccaaatcatgtcgcaggcttcttcccgtgtcatcacgccgtcatgctgcagtttgttgattgcggtcagaaccgttttagcgtgctgataaaatgcttttagatcattttgttccagcaggcttttcaggagcggagcatgcccttctgtacttctccggatatggatggaatcgggcggcatgagttcatgatcgaatgaatgttcctccgcggaggaaaaattacatccaaagagaatgataggaattatataaagaatatgtttcatggttgtttattctggtttaaaagaatgcttgttgttttcttctgttgacctgctgacggagcatccaaatttggaaatcgtcgttatagcttcttccagaaaaagaacccagtcataagaaaaaaattgattttctgtttgaatagttgcgacatcctttccttcgacaaacatgttccaattacatttccagctccacttttgcggccatttaacatatcgttttaacacggctacggatctttgcgttccaatccggtcaaacattctgttttttctgtcgagttctgcaggttcgggattgggtgtatgaactgttaccagattgtcttcagcaggggctgggagacatcctccgtccctctctatgatttgaatgttttgaaaacttacatccgtagggagaaaggtcagttccaggtaagcagaggctcccgccatattttgttccccgtcttccggcattccttctataatcatccctcttttattaaaatccggattattcctgtcatcggatttacgacggtgctttgcgcttattctttcgggaataacggccgataattcgatttttgcttctcttccttcttctgttgttgctttaatagtaattggaccaccagcggagatatcttttctaataatcaatgtcgttgtttcagatttatctctgtcttcgaaaaatgccagattttctccttcttcgattgtccattcgatctgggatgggtctccaatgagctggggcttgtctgaaaccagggtcaatattactgtttcacctatgcccaatttctttcttttttgatcgttctctttctctttttcaggtacggagcctttttcttcttcttgaatataaatttgggcagagtactctgccgcctgcgattcgatgcgcaatacctcatttgccagtaaaggcgctgtgaagcagaggcccagcagcatcatggcgagatggcgttttgccggcattcccggggataagacgtatttttggaagaatggggcggatgcccggatgatggcgttcgcgttcatgttaaaattctctgtgctggttaccggttctgccgcaggggcgagactttattgccgctgattttgttgatcaatatttccccttgatgctttaattttttgtcattccatatttccagcagacggcggtaggttgccacatagtatgtgcgggtctgttctctttttcccaatgccgtgatggcgccttccatcatgccggcggagtatcttttcattttaggcgtccatgaggcattgttccctttcctggcccagacggaaagatgcttcccgatgaatccctccctgtatttgattatcttgctaatttcagggcaatctgccacgagtttgttccagcacagcctcgtgaagagttcctctgccgcgggagaacagtcagagtccaggaaacaggcgtacagttcatagggattgaccttgctttcccggattttgagtatgtttaccgctgcatgatggaggaggttgtgttcatggggcatggcctgcgccagttctttaagcagggtgagtttttgccggtcattgattcctttggccttcatgctcaggtaacgacgccatgccggataattaaatgggttcatcttgcaggcttctttcagcagcaattcccgttggacgggacgcggagagcagtcagataaaaccgtcatcaggaaggattcttccgccagaccgtgatgaatgaaggcattgtaagccgggatgagctggacaggtccgttccagggtatctggctttttcccgttgaccagttccatccgctgatgttgttgccgattttccagtgtccgccgggatgtttccagataaaggcgcagtgtcccggctgcccgatggcccacgcggggacgcctttggctctcagaaagcctgccgctcctttggagacggcgccgcacacgcctccgtattccgtataaagctttaatgtgaccggtttgtggtcgtaaaaagcggctccggcatgaacgctgactccctgaaggttttttctgcgataggggatgaaacccatgaatttatttccagcctgttcgggagggatctgttttttctctatgaactgctgggcccaggacaggtcttccaggctctctctgccacggaaaacgatggcccattcccacggctgcatcgtgtccgcctggggatgacatgcggattggaagtaggattcccggtaaaaattgaatttggacaggcattcttcaggagggatgacatttgaggcaagccctgcccccagagccatgctggtttcaacggggcggagcgttttattgttcgcgttccagatgcggtaaaatatggatagggtttgtttgctagctgccccggatagggcaagcattctgaagacttccgggtgggtggagagccatttcctgaatgccccgtccttgagttcatgctgcgtgaacggttctccgttttccgcggtgctgaaaaattggtacaggtggcataacagggcgacttgcggggcgtgtgccatggcccggattttatccgtgtcaaggtttgcggttcccagtttcctgcacagaatatcccgggcttttccggagatgaacgaggaacgttcggctgaaagtagtgtctggatatccggttcctgcgctgacgcctggataacgggaaaggctgccagggggagcgctcctaaaaggagaattcggaagatattattcatgggagatgggcggaattgtatccatacctaatataatccatcatatggcaaaaagatgatgaactgtcaacggaaatatttttattttctgggaaaatgattgaacgaagaatcaatggaaatagaaacccagtgaatgaagaggcgccgcgaaaccatgtccgcccgttgaatggaggcgtcaagggcggatcaggttttccatattgctttggaccaggtcaaccaggttgttgacggtcatgcccagttcctgcgccgcgcgtcggtaaagttccggaagggtttccggatgcccgtccgattccagcgccagccgatggagcggtatggaggcaaggagtcccggacgttccatttcccgcagccctacggaaagaagccagtttcccgaaggaagttccgtgtcgggatgcagtgcccccgtccagccgtgcaggacaatgttcaaacggggatattttgtcagcatttccgccagcgtgccccatgcgcggcagcagtgcagggaagcggggcggtccagacgcgcggccagttccagatgccgttccagcgcttccttctggagaggcagccccgggatgccgcgccagcatttgtccagccccgtttccccaacgcccgcatgggggattttttgcagaagggattccagcctgggcatttcctctttccattcagccgggttcaggaaccagggatgaatgccgaaaaagggcgtaacgtgttcatcctgttccgccagaagggccacctgtttccagtccaccggggaggtgccgcagatgaactgcggcgccgtgccggaagcggctgtagaggaatgggtgtgggcgtccggcagattcatcgttgcttaatgggacagagatggcgcatccgacggttcaatgatatcaaaactctgtttcgccaggcgcacggcggcggcgcccgtttccatttcatcatggatgacgttggtgatgcccgcgtgatgcagggaagccacttccgaacggaatttggcgcgggcaatcaccgtgatgtccgcattggctcccttgatctgcatgtaggtggacagggccggggcagggtccgggaatgtgaaggcaatcagccgcgcggtacggacgcccgccaggtccatggtgatttggtgctggatgtctcccagaaaggccagatggccgccgttgagcagggatttgacggtgtccgcattcaggtcgataatgatgcaggggatgccgtactgggacaggctttcatgaagcctcctgcctacggggccatagccacaaatgatggcatggtccctgatgccttccatgcgtgtgatcagggtttccacgttgaggcgttcccgttttgttttcaacccgggaatgcgcaccagcagcggggtaagtttccgtgccgccttcatcagcagcggagtcatgcccatggagacggcggcaatggcgtaaacgttggtggtcaccagcgccgggatgggggatatttcctgcatgaaagggatgagcaccagggaaaattcccccacattggtgagtgcggtggaggccatgatgcccatgcgcccgggaattttcaggaagcttgcggctgtaaggcaggctacgaatttgatcgcgaggacaaaggaggcgaaggttgccacctggccgatgtgttcccacagtccatcaatgtcaatcaacagcccggcggaaacgaagaagatggtcaggaaaaggtccttgaaggggagcacttcgctaagaacccggtggctgtaataagagctgctgacgaagaggctggcggtgaaagcgcccagggcgatgctcaggcccagcagactggcgagcatggcaattcccgaacagatggcgaacaccatcagggtgaagagttcccggcttttggtccgggcgacggccagcatgatgcgcggaagcaggtagcggccgatcagccaggcggctcccagaaagacaagcccccgcagcacggccatgccgatgttgagcgctgtttcccatgagtcgggtgcggcggtgaagatctgcggcatgattgccaccagcatgatggcggcgatgtcctggaacagggcaattcctaccgccatttttgccccggaggttccgctcaggccgaattcctggaaggatttcagcgccaccgccgtggaggatagtcccataatggccccgaccgtcagggagtggctcatgtccatgcctgtggcgtaatgaagccccaggccgaaagccgcagtgcagatgaacatctgaatacctccaccgaccagagcggttttccgcaggtgcttgagttcatcaacggaaaattcaagccccagcgtgaacatgagcaggataattcctacctcggaaagagcctggatgctgacgtcggaattggggatgtggtccagaatgccgcagttggccagaattaccccgcagatgaagtagcccgccagcagggactgccggaagtgggccagaatgagggcaatcgcgatgattcccatgaagacgacagtaagcagaatgaagaatggaggcgcgtcattagggcctccggaggccagcagagagagaaccatggcggtcaggtcgggaagttagggaatggtaatgaggttgatttccggcgggcagttgaagcggcccggccctatatagcctatgccgcgggtgacgaatacctgcttgtcctcataaggatggaacccggagtacatggtttccccttccgacgccaatagcggggtagaaaagaaaggcagtttgatttggcctccatgcgtatggccggagagcatcaggtcccagcggtaatttcccagcaattcccttcctttggggttgtggctcaggacgatggttggcatgggcgagttttcctccaatccgcgcgggctcatgcaccggtccgggaaaaagtcaccctcccgcaggtctcccagccccaccagtttgaattccacatttcccagcctggggatggagacgaaggcggcggaattcctgagcagtgtgaagcccccttccttcaggacgcgttccacattgtccgcaagggccatgtcatggttgcccagacatgcgtaggccggggcgacggaggagaggcgtttcatctgggtgatgtagtcgcctgcatgagtgacccgcagaaaatccgtgtacagatctcccagaaatacgatcatgtccggtctggcctgttccgctattgttgccgctttttccagcagaggcagattggtgtggatatccgacaataccaggatacgaaggccggaaaggccgggtacacatccggcaggggccgtgttttcattaaattccagatgattggcttcccagtgcatgtaggaggccagcagggaccccagcagaatgacagccgcggccgcatacaggagcttgcggagctgggaacgctttttggagaaagggtgggtggtcatgatagggaggggttgagaatggccagttccggcagggtgaataatccgttgcggcgcaccagcttcccgtccaggtaaatatctccgcccccggccgcttccgtctggatgcataccatgtcccagtggatgcgggactggttgccgttgtccgccacgtggtaggcctgtcccggcgtcaagtggaaggagccggaaattttttcgtcaaacaggatgttgcgcatggggcgtgtgatggccggattgacgccgaaggcgaattcccccagcctccgcgcgccggggtctgtgtcaagaatggcgttgagctcccctgttttatctcccgcttccgcatgcacgaccagtccgtttttcagcgtcaggcggatgttgtcaaaggggattccctggaacaggctgggcgtattgaaggaaatgtggccgttggcgctgtcgatgacgggggcggtgaatacttctccgtcgggcaggttgcattcccctgcgcacgggatggcaggcagccctttgatggaaaaggaaatgtccgttcccggcccggtaattttcacatattcagccttttccatcatggcggccagctttcgcatggcgggacgcagggcggcgtaatccatcagacaggtgcggaaatagaaatcctcaaactcttccgtgctcatggccgcctgctgggccattcccccggacggccagcgaagcccgcaccagcgcgtatggcggatgcgccgctgggagacggggttcagggctttcatggcggcggccatattttcctgtggaacggaggacagttcaaaggcgttccccccgccgcgtatttcaatgtaggcgtccatgtcctccatttccgccaggcggtggcggccgatgatgccgtattgttcttccgttgctcctgagagcatttcccggttcaggcgggactggttcaggcgcagaaagggtattgctcccgcattcctcgcctcccggatgagggctattcccatttcctccggaatatccgtcagttccagcagaaccctgtctccggggcgcagggctgtggaataccctgcaagctgggctgcaagggcctgaaaacgggggtctctcatgcctttattaggcaaatacggcagcctttttgtcaagccggagacttgccacgggcaaaaaactgtggttttatcccccggatgtccagattgcccaagttaggaatactcggttccggttccggttccaattgccagtccatttatgatgccatccagtccggttctctccgggcggaaatcgccgtggtgatgtctgacaatccggacgcctatattctggaacgcgcccgttcctggggcattccggcggaggttattgactgcgggggatttaaaaccagatttccggaggaatcccaggcatccgttgccgcgcgcctgaagcaatacggcgtggactgcgtgtgcctggcgggattcatgcgcctggtgaaacttccgttgctgaaggaatttccttcccgcatcctgaatatccacccttcccttcttccagccttcccggggcttcatgcctgggagcaggctgtgaacgccggagctgcggagagcggctgcaccgtccattatgtggatgacggaatggatactggccccatcctgggccaggctcgcgtgcccgtgctgccgggggatacgccggaaagtcttcacgcccgcattcaggagcaggagcataccctttatcccgccatgatcgcccgcgttctggaaacgctggcatgacctgattctccttctgaccggaaagcaatccggcctcctgctgggagaggatgacaggatgaccgattctcttgtcttgtgatatgaacggaatccgttaaaaaggagtcctcttttcaaagaaaggataaaaataccatgaagatgaaaccttccatcgccctgtttgccgcttccgctcttctggcgggtgtggcaggcgcgcaagaaaaggccgccgaagctccggcagccgaccaacccaaacaagagaaagaaattactgtgtctcccgaacagatgaaaaaggacctgggctattttctgggtttccagagcggtcagcaacttggttccattcctaccctgacctttgacgacctggaccaggaatccttcctgcagggcatcaaggatggcatggtccgcaagcccgccaaggaccaggaacagctgaaacccgccctggatgcgttccagaagcaaattgacgaacgcatttccgccaaggccaaggccaatttggaggccagtaagaaattcatggaggaaaacggcaaaaaagaaggcgtcaccacaacgaagtccggcctccagtacaaggttgtgaacaagggcggcgaagaaaaatttgatgaaaagaagttcaagaaccccatgttcaaggtgaagtacaagggcacgctgctggacggcaccgtgtttgacgacaccaagggcaagtccgtggaacttcctctccaggtcatccccggttttgccgaagcgctgaccacgatgcccgtcggctccaaatggattgtctacattccttccgagctggcttacggggaaaacactcccggcgctccgattgaacccaattccccgctcatctttgatttggaactggacggcatttcggaagcccctgctccccagggaggccccatgagcatttctccggaacaacttcaggagatgcttaagcagagcggcgcccagcagcagtaaggaaaaaataattcaagtcagggccgttcccgggagggagcggcctttttgtttctatccgtaccgctttcatcaggaaagcgaatgggcagactgggaatttataatcctgcttcttttcttaatctatatattttacttgtaatgaaagagttatggttttgcttctctggatatgtaggcggatatgctggacaggtggagtttattattttccattatttatttaatgcgagtcatttctgaaaatagacttgccaacggattataaatccgggtattactggtcacaatatctttgatcaatatgagacttcatctccctccgtccttgcgttccgcccttctcgcttccctggtttccttctccggcatttactcttattcccatgctgcaacctcggcggatttctggcagatccccgattttggcggtcctgattttacatggacgggggctggggaaggcgacgctgtggggacggcaggcaactgggagggaggctcggcgccgtcccgcgtggacaataagggtccgcatttgatttttaatggcgtggatgtgacggttacgggaacgcctcccaatacctcggacggaggcggtatttccgttacggggaacggaagtgtgtctgtggggcttggacaatggggcggcaatgtttacgtggaaaagggttcctcccttaccacttctttcggtacccagctcaaaaatatggagccagaggggcatgccaatatctatgtggacggcactctgaacatgactactccgggagggaatctcaattttgacaatggtaccggtgccgataatcattactggcacattgggcttgacggaatgatcaacctgtcaaacaccaccacaattaccaagaacgccaaaacatggaatgtggaggtagtggttgccagcgccatggaagggcttacggtcaccaatcgcgagatggttgacgacgccctgatcacacgctatttcatgtctacaggggccgatttgggggcatccctggattccttgcgtatttggaagcaaaccggggatgatgcttatgaggcattgacgagggttgattccgctagccagctgggggcgggtaatttcctgcttgtttccaacggttctggcatgtccgtgcagtacaagggggaagggtatgatgcagaaactctggtgtggaattccaacgggacatggagcaatacgggaacgggctggtacaagcagggtgacggaaccaagacggatacttccttcctgaatggggatgccgttatcttcacagcggcagaaggctccaaaacagtcaatttctccggagggatcaatgtctcctccatgacatttgagacggattatacgctccttcccggggaaggcgccactctttttgcccaggaaacggttttaagcaacgggtcgtccctgacgttgggtgacggggatcaccgtttttccggttttgaaagcctggtgacgggaggggaaaattcttccctcacggtttacatgaaaacggaggcttcttctgcgggaagcgtcaatttgctggagggttcggcccttcagaatctttacgtttatggagccttgagactgggggcttcttcccagtcgggatcatggatgcttggcggagccaacctgcatatgatggcgggttctaccatggtattcgattccgatgcggggacatccatcggagcggggcaaacggtaatcgcggagggcagcttgaatgtctatgcgcagaatgtttccgacagcaacacgtatctctggaacctggtgggcggcgagagcgtctcgactggagatacgctgacctttaacgggaccagcaatccgaccgtagcagggaatatcacatacgccgggaatatcgtatctggcgcccagaccggttccacggtgacgtttacgggaaatatccaggcggaatcgttcaaggtagcccattattacggcagggttcatatggccgataatgaattggaagttaataaactgtgggtcggggccggcggtgggtatgacaattccttatatggtgctcttgatcttgattccggcaatgtgactacggcaggccaggtccggcttgccgagctggggcatggggtgcttaatgtgaaccagggttcctctctgactgtcaccggcagcaataatacccatagcacaagcgccagtttcctgctggctcactgggcttattcaggggaacttaatttgaggggcggttctttgactgcattgcagtcctcgatgcatctgtcctgggatggcactggcattttcaatgccgcgtccggaacggccaatttgcagggaatggatttttgggcttccggaagcggttcattccggggcagtttcctgttgggcggcgcaacgtccggggatgccagggtgaacataggttcttcgggcattaccaatgtggcgggagcggccgttatcaaactgggagaaggcactctgggggctttgtccaactggggtataagctataatccggatttcacggcatcttatatagaacttctgggcacggtgaatgggactatccttgacacgctggatgccaatgaccatgccacggggcgtactgtgactttctccaacgggctgaagggaggcggtaagctcgtgaaggttggcgacggggttctggttcttaacggaacagcccaggccccggttcctgccgaaggagaaacagcagccgtccccggctttaccggaacagtggaattgagagaaggcggtttgacggtgaaggattccagcgttatagggcagggggctttgctgatcggaggcggtcttactgtgaacgttacgtccgcgggcgggtatgtgctgaatgccggttccacgctgggctccacgggaatttccggaggaacggctactttatccgccgggttgacgttaaacggcggcaccctgagcttcagttctcttgattcggagacggcggccctgaccgtcaattccatcagcggcagtgaggctacggaagtacggctggggctgtcttccctggaaacggggattagttatgccttgctttccggagcagggttgacggaaagttctttctttactttgggcggagctgctgcggagttgtacaatggaacgttttccgtcagcaacggcactctttacgtcaatttgagtgacaaggaaggtttgttgaggtggaagagcggcacctggaatacggaaagctcgaatacttcctggagccttgacgggacaccgtcagcttataccgacggggagaccgtatatttctccaatggcgatggcgtggataaaaatgtgacgattgcggggaatgtcgctccaggcagaatcaatgtttccggtacggatttcatttttacgggtgacggttccattaccggggatacgacgctgaacctgctggacggagcttccctgaccatgaacaacgccaactcctatgccggggataccgttcttggcgatggcagcaaactcgttgtcggcaatgccggagcgctgggcaccagcacggtcctgttgcagggagattccgttctggaactgaccacggggacgtggaacgggttgggaacacgtttgaacgtcaattcctcaggcacgctgaaattgagcgggaacgcctccggaacgacaacggccgccctgactggagtcaggtatgagctgggagccaataccacgctgaccctttccgccggaacctatggaaatacgattaccggggccggtacgctgatatccgcggtaggaatgaatgtccttaatggaaatgttgatattacaggagagtacagggtgctggcaaccaacggcacggcatgtacctggacgctgggggctggcgcttccgtgacggcgggaagcttcatcggccgctacgagtacaatggaacaaccacgctcaacatcagccgggacgccgtgatgaacattaccggcacgctgcggattgcccgtgacggaaaaggcgtcatgaatattggttcgggcggcatggtgctggcccagacgctggatttggggcagaactgggatggagtaagcgccaagggcgccaccattaatctgaatggcggttccctgcttctcggttcaggcggcatgacggcatccggaaataccaatacgattgccctgaacatgaactccgggacgctggggacgacggcggcggaaggttggtcttccgcctacaatatgtcccttactggaaatgtgacggttgatacccgccagtatgatgcggaaaccaagtcctaccatgaccaggcttccaccggcatcaccctcggaggcgtcctttccggagcgggcggcctgacgaaaaccggcttaggcaccttgaccctttccgggcagaatacctatacgggcctgactaatgtccaggccggaacgctggcgtttacgaatacgaatgccatggccctgggcagcatttccatgggtgcgggcgccagaatgacgacggcttctgctctgacgctgaatagcggcgctaccctcacttttgacatgacgggcgtggtggcgaatgagcctgtcatcaatatcacggccgggtctctggctcttacggattcgtcctgtgcgctgactatcaataattatggtgaattggaggcatctaactatgtcctggcccagtgggctgcggatggaagcctgacgacggattccttcacatggacgcccgacatcaccagggaagggttcgaatattccgtggtggtggaaaataaccagcttgtgctgaaggttgctgacgtcagcggggacaatggttttgtctggaacggaggaacggaccggaagtggatcaacaccagtgttgacggctggacgacgaggctgacgggggcggatacgctggataatcaggaaatttacttctcctccgcggaagcgggtgaagtcaaggtttccggcattgtaactcccaagagcgttgttttcaacagcggcgcttacacgttggtcagcgatcctgacagcgaggggtctattgcggattccacagctcccaccacgcttaccgtgaacggtacggctgaagttgccttaaacctggccaatacctataccggagggacgatactcaatggcggtacccttaccattggcgctgacggagcgctgggaacggaaggggatattatattcaacggggggacgctggcctatgcggattccgctgccggtgaggatgcgacagggtatgacatttccagccgtgtcaacgtcggagacggaggtttcctgaacgtttccgtgcttggcgccggggataccgtttcctgggctggcttgtcagccgatgtcatgggggcaggcactaccctgaccaaaacgggagcgggcacgctggcccttggatacgcagggaataccctggcccacctcactgttgaagagggtacgctcgctttcacgggcggtgcgactatcggcgtaaatccgaacaatgctactattgtccgcgtcagtgaaggcgcttcccttgctctttccggcggaaccgtcaacctgcatgcccagctcaatggggcgggcaccgtcactatcgggactgcggatactgcgggactggtcaatatctccaatacgggcaataccaacttcactggccgcctggaactggtcggcaacggggtgaatatgaataccaatgccaactgggtagcctttggggcaggaaatacgctgggaggcggtaccgttttcatcgacggcaagggcttccatttttccgcgggtacgacggcggccaattttgaaatcggcgcaacccacggtgcgatgcagaacggctcctccggcgccacatacactttctccggaaacctttccggttcgggtacgtgggccatggctgcgaacgttcggatgaacaatgtcctcacgggatccctcaaggacttctcggggaccctgtccaccaatgagacttccgccaacaacaatcgccaggcctggaacttcggttccggcggggggtgcgccacgggtgaagggaattccgtttttggagacggcgctattctgggaggtaacacggggtccacggataccgggctggccgcacaatacaacgtcaattacaacaatacggaactggtgttgaacgctctggtgcagggcaactccagcctgacgcacgcaggcacgggcactctgattctggatcaggccaataccgctacgggagcgctcggcattacaaatgccggagccgtagtccagcttggcacggaagccaaggccggccagtgggccggaaccgtgctgaatggagagggaacgctgaaaatcgtcaatggcgcgctgacctccgccatgacgcgggcggaaggcgccacggcagccattgtcgtggactcagcctcttctgtcaatttgggggaaactgacggcagcatgctcaagggcattacgctggctgccggaggcaggcttgccaacgtttccggagatattacggtgggggcgggagccacggaaacattgaatcttaccttgggggcggataacatcaaccaggatgcggccggggcggccatcattgaccagggagacggcaggcttgtcatcaacaatcccgccatagtcaatctggacattgacgctattgtgaacacgctcgtcgcccataaggaagccggtgcggaaagctggctcaccctgacgaccggaacgctggaatgcgaaaaccttggcgatatccagttcagcaagattctttccaattacggcatccgcgtgacgggcaccgatggcggaagcctggtgctcagcgggcaggtcagcgggctttatatggtggatgattcctctacttccgatcctgataccgtcaccaactacggcacgctggggatgtactccggcgtggtgatttcccaggacaagacgcttaccgttcagttggttggcgcacccggcgattccgacggggacggcgcggtcatcaacaacctgctgggcgctacgggaagcacgctgaaagtggaaaacaccagtgcggacggaggcaacgctgttgtcatcctcaacaacgaacgtctggaaacgggattgcctgctcctgatgattacgccggtgcggattccatcatgggcggaagcatcgtcggggaaaacggagtcaccttcgtcaagcaaaacacgggcaagctgacagtcaacggttcttttgtgacggacaccctgcgtgtggaaggcggttctctcgctcttaacggtgaagggaacagctttaatcatgtggaacttgctgacgcagaggaagggggtgttctggacatcaaccggaataccgtcatgggtgatttgacggacagcggcgaaggcgcagccctgaacatcggcagcggagcctccctttccgtcaacggcgccagtagtctttcctccagcaccatccagggcagcggaacgctgaccctccgtgatacgctggaaatttccggaacagcctcccttcagggcggtgttcttcttgatctggcaaaagatgacgattccacgggaacgctcgacctcggttcgacatccggcagcaccgtttccggaatcggcggagaaggaacactgaagagcgcaggaggcgttttgaccgtcaataccggtaatttgggcggtggttccgttttcagcggtacgctggagggacgcgggcagcttaatatttccggcaatgccgggcagacgtttgaaaacgtcatgaccgccgcaagcagcagctgggcagttaacagcacgggccttctcagtatccggatgggagggacggtggacaacccgagagccaatacggcgctgaccctcagcagcttgacgctgggagacggttccagtacgaaccttaccttcaacacggactacgctggccccatcatcagcgtgaccggaaatatcagcatcaaccagggcgcggaaataactctcagttctactggcgggaatgaactgactctggacgcagacggcagttatacgctcatgcacgcggatggcaccattgatctgggaggaagcgacaggctggctatcctgttggatcccacctcctccgctttcaagaaatttgaaaatgatgcgtacctggtgatggaaaacggcaaccttgttctgatggccacggcttccaaggacaataaatatgcccgccttgcggatacgtttaattccagggccggagcagaacttctctggaacctgcccggcgatcttgctgcggattccatcctcaagaaggtggatgacgccgtaggtgccctgacgtcttccaacccctcggaagcgaaacgcaccatggcagcagtggctgggagcacggtcaacgcactggggacggcacagagggacgccctgcgcgaccagatgggctggatcaggaaccggaccaccctcatgggcgtcaacccggcctacgtcaacgacgacctcccccgcttccacatgtggatggaaggcacgggctcctacgccaagctcgacaccgcgcgggatgaaagcggctaccagctcaccacctggggaggcaccgtgggcgtggacgcggacctcagcgaccgcctcacggtgggagcggccttcacggccaactacggcgacctgacggccggcgcggcggacagcgccgacgggcacctggacagctactacgccagcctcttcggccgttaccaggacaggcgttgggcgcacacgctcatcctgacgggagggtggaacgacgcgaaactcaaccgtacggtcaactacggggaaggaagctacgggacgcagggaagcaccagcgggtggggctttggagcgatgtatgaactcacctacgacgtatacctcaacgaaaaccgcagcagcgtgctgcagccgctgttcaacgcctcggtggtgacgacgcggatggacggctatgaggaaacgggtgcgggcaacgcgggcctgaacgtcggcaggcaggactggacgacggggacgctggcgctgggcggccggtggatgggcctggtgggcagcaacatcttcggacgagaagcgctggcggaaatccgcgtaaacgcggcgcaggacctgggagaccggagaggggaaacgaacgtctctctgctgggcaaccccggctttgcgcaaagcgtgaggggggcgaaagtgggaacgacggcgctgcagctgggagccggactgagcgtgccggtgggaacgaagggaaccatctacgtgaacgggaacgcggacatccgggatgggtccagcgcgctgaacggaagcatcggctaccgctacgacttctaacaagaaagaaaacacaaggagggggcccccacccccgaaaggccttcctcctgaccctccagagccgctccggaacaactccggaacggctctgttgcctgaggaaagccccttggggcggcccggatgggccaaaaacaaaacagcggcaagaaaaaaaaatacgccgtccccacggaagccatggccctttttcccctcgtcccctcccgtgaaacgcctcatcctctcctcaaatctgtaaaaacgcgccaaatgtttccggaagccctctccgctgtccggagccggaaaagaacggaacgcgagcaatagggccttttttatgcgatttcagcggaattttgcaaggctaggccctacgcgcgcgcacgcgttttataatattagtcttgcaaaaaattaagataagcgtagtatatttcggttatgtccgaagataccaacgaggttgttgaaaccaccgtttccacgacggcgcagcatgaatacggcgccgcgcagattgacaaactggaaggcctggaggccgtgcggaagcggcccggcatgtacatcggggaccctgacgaacgaggcttgcaccattgcgtatttgaagtgctcgacaactctattgacgagcatctggcttactattgcagcaagattgacattgtcattcatgtggacggttccatttccatcgtagataacgggcgcggtattccggtggatatccacccgaagttcggcattcccgctgtggagctggttctgaccaacctgcacgcgggcggcaaattcggtcagggtgcgtacaagtactccggcggcctgcacggtgtgggcgccaaatgcgtgaatgccctgtccgactggttcaaggcggaagtgcgccgggacggcaagcgctatcagatcaaatttgagcgaggcaagacggtggaacccctccgcactgtaggttcctgtgcctgtgaagtcacgggaaccacgatcacgtttttcccggatgccaccattttcacggataccacggagttcaagtttgaccgcctgacgacgcgcctgcgggaactggctttcctgaatcccggcctggtcattgaactgattgacgagcgtgaagctccggcgcgccgggaaacgttcttctataaggacggcattgtggagttcgtacgtcagctgggcacgaacaaggaagtgatcaacgaggaccccatttccatttccggcgtccggaaggtggaagtggagtacgacggcaagaagatggaggacgatgttctggtggacgttgtgttccagtacaacaacacgtatgaaacgaacatcctttgctttgccaactccatttacaatggggacgggggaacgcacctttccggattccgcggcgccctgacgcgcgtcatcaacggttacgcaaaggccaacggcctgctgaaggaaaaagatccctccctgagcggcgaagatgttcgtgaaggcctggtggcggttatttccgtcaagatgcccaacccgcgtttctcctcccagacgaaggacaagctggtgaatacggagattgaaggcgtggtgggcaatgtcgtgtacgaggaaatcaagacgtactttgaagaaaacccggcgatggccaagaagatcatcgagaagagcatcacggccgctcgtgcccgggaagccgcccgcaaggcgcgtgaaacagtccgcaagagcgccctctccatcggcggcctccccggcaaactggcggattgttccgaccgggatcccgcgaagtgcgagctgttcattgtggaaggtgactccgcaggcggttccgccaagatggggcgcgaccgccgcacgcaggctatcctgcccctgcgcgggaaagtgctgaacgtggaaaaggcccgcctggacaaagccctggggagcaaggaaatccagaacatgattacggccatcggcgccggaatcggggaaggggacgatgaagcctccttcaagctggaccgcgtgcgctaccacaaaatcatcatcatgactgatgccgacgtggacggcgcccacatccgcaccctccttctcactttcttctgccgccacatgccgcagctggtgcgcgccgggtatctgtacatcgcccaggcgcccctgtaccgcatcatccgcaggaaaaaggaagagtacgtgcaggatgacgtggccctgaaccgcaaactgattgaactggccgttaatgacgtgaccctgcgtttcgcggacggctcccgttccttctctcccgaagaactctccgccattctggaaacgctggtcaacctccagcgctatacggaatctatgcaggcgcagggcggttccctggaagacctgctcagccatcgggaggccaacggggaattcccggaattcctggtgaaggtgcgctgcggcaatgaagaggaaatactcttcttccatgacatggaggccctgaccgccttttctgaggaaaacagggaccttttcatcttcggcacgccctcggaagaggagctgctggaaaatcctcttccggaacgggaggggcccagccgccgttccatcactcatgaactgcatgaagccaaagccatcacgcgggccctggcccggctggcggaactgggcattccggggaatatgattgtctccatggatacgcccctgtttgaactggtggagggtgaaggggataaggaaaaagtaactcccctgttctccgtcatggacattctggaatccgtcatctccatcggcaagcgcggggtggaaatcacgcgattcaaagggttgggtgaaatggatgccaaggacttgttcaagacgacgatggacccggaacggcgcgagctgctccgcgtcatcctgaacgatgacaacgccgtcagggccgatgaaatgttcaccatcctgatgggggatgtggtggaaccccgcaagaattacatcgtggatcatgccctcaatgtccgcaaccttgacatttaacccccgcactctctttcagcaccatggaaaataatagaatcaaaccggtggatgtagccagtgagctctccacttctttcctggactactccatgtccgtcatcatctcccgcgccctgccggacgtgagagacggcctcaaaccttcccagcggcgcatcctgtacgccatgaaggaactcaatctgtcccctgggggcaagacccgcaaatgctccaaaatcgtgggcgacacgatgggtaactaccaccctcacggggatgccgccatttacggcaccctggtgaacatggcgcaggactggtccatgcgggatattctcgtgatcggccagggcaacttcggcacgccggacggagacccccccgccgccgcccgatacacggaagccaagctctccggcatgggcgtggccctgatggcggatttggacaaggacaccgtggattttgttcccacatacgacaatgaacacacggaacccaccgtgtttccctccgctttcccaaaccttctggtgaacggcggcacggggattgccgtggggatggccaccaacatgcctccgcacaacctgggggaagtggtggacggtatctgcgccgtgattgacaatccccacatgactgtggaagagctgcgccagtacatcaaggggccggattttcccaccgggggcgacgtgctgggcttttcaggcattgacaactacttccgcaccgggcgcggctccgtgcgcatccgcggcaagatagacatggaagtaacagattccggcaaggatcttctcatcatccgggaagtgccgtatggcgtgaaccgcgccgcccttcaggaacgcattgcggaactgtacaaggataaaatcctgacggatatttccggcatccgtgacctttccgatgagaaaacctgcattgaaatcgagctgaagcgggatgcccgcccgcaggtggtcatgaaccagctttacaagctcacctccatggaaacttcctttgcggtgaatatgctggcgattcatgacaaccgccccaagacgctcgccatgatggacgccatcaacttctacatcgagcaccgccgcgaggtggtcgtgcgccgcacgcgctatctgctgggggatgcggagaaggatgccgagcgcctggaagccttcctgctggccctgcaccacatggatgacttcatttccattatccgggattccaaaaaccgggatgaagcccgtgaacgcctgcagaattacaccttctccacgcagacggcggaaagcctgggcatcctgatccgttcccaggcctccatccagggggaccgctacgtcttcacggaacgccaggtgaactccatcctggacctgcgcctgtaccagttgaccgccttggaaaacgacaagatttccggggaatacgcggaactgctggtccgcatcaaggactacctggatattctggcgaacgaatcccgcgtgctgggcattgtaaaggacgaactgaaggcgattaaggacaagtacgccacgccgcgcgtcacgcgcatcattcccttctccggggatatggccattgaggatctcatcccgaatgacacgatgatcgtcaccatcacgcacagcggctacatcaagcgcaccaactccgcggaataccgcgtgcaggcgcgcgggggcaagggcgtgaaggctgccactaccaggggagccaaaaaggatgcggaagcggactttatcgaacacctgttcgccgcccagaaccacgactacctgatgttctttacgaacaccgggcgcgtgtacgtggaccgcgtgtatgagattgacgaagcggcgcgcagcgcgcagggtcgcaatatcaagaatctgctggatctccagccggaagaagccatcgctgccatcctgcgcctggaacgccgggtggatgaaaaaggcaatgacattacctttgcggaaggcagcggcaatgttgttttcgccacgaaggacggcacggtgaagaaaaccagcctgaacgatttcgccaactaccgcaaggccggcatcattgccattaatctggaggaaggcaacagtctggtgaacgcggaacttaccagcggggccgatgaaatcgtgctcgtcacgcatgacggcatgagcatccgcttcccggaagaagatctgcgtacgcagggccgcaacaccatcggcgttcgcggcatccgcccgcgggcgggggactacgttgtggccctggccattgtggacccgcagaaaaccctgctggtggcttctgaaaacggcctcggcaagcgcacttcctttgatgaataccgcacgcagggccgcggcggcaccggcatcaagaccatgaactgcacggataagaccggcaaggtggtttccgccacggtcgtgtccgacgaggacgagctgatgctgatgaccacggccggacaatccgtccgcatcaaggtggcgaccgtgcgtgaaacgggccgcgccacccagggcgtgaagctcatgacgctgaatgagggcgaatccatccaggacatttccatcgtcattcccgatgatgaagatgaagaagtcccggtggaaacggaagacgcgggagccggggaagtgtccggtgaaatggaagctccggcggaagaataacatccaggttttcctgctccggcgccatgccggagcagggggcttcatgggccgtttttatggaagaccccctttcattggagcaatgtgccggacgtctggaacggcgtggattccggagttttgtagtgccgggcctgagggaggctgcggaggtgatgcgcggcctggtgcgggagttcaggccgtcgtccgcttcctatggggattccatgaccctgaaggctgcgggcattcttgatgacctgcgctccaatccggacattcagttttatgacggctttgttccgggcatggtgcgggaggagaaatgggaaatccgccgccagggcatgacggcggacctgtttttaaccggcgtcaatgccgtcagcatggaagggaccctgcactgggtggacatggtgggcaaccgtgtggctccggtggcattcggaccccggcgtgtcattttgctggccggttccaacaagctggtggccacgccggcagaggcccgggaacgcatccgccgcattgcgcccctgaacgccaggcggcatgaagggttcaggactccctgcatgcacaccggaatctgcgcggattgtaattccccggaccgcctgtgcaatattcacatgtccattgttaaatgctttcccaagggaagaatttccgtcattctgatggaagaacccggaggactttgacccatgccttttcaaaaccggatagaaatcatggccccggcggggtcgtttgaatctctggcggccgccttgcagggcggagcggactccgtgtacttcggagtaggaaagctgaacatgcgttcccgcgctacagtcaatttttcggaagaagatttgccggaaatcgtcgagcgctgccatgaggcgggcgccaaagcttatctgacactgaatatcattgtgtacgatgaagagctggaggcggtgcatgccctgtgcgacgccgcctggaaagccggtgtggatgccgtcatcgcttccgacctggcggtgatttcttatgcgcgtttcattgggctggaagtccatatgtccgtgcaggccaacgtctgcaacatggcctccgtcaaattttacgcgcagtacgcggatgtggtggtgctggcccgggaactcaccctggcgcaaatcaggcatattattgaatccatccggaaggagggcgtgaaaggcccctccggggagctgctgcgggtggaaattttcgcccatggggcgttatgcgtggccgtgtccggcaaatgccacatgagcctggcggcctacaactcctccgccaaccggggggcctgcttccagaactgccgccgcgcctaccgcgtgacggatgaggaaacgggcaatgaactggtgatagacaacaaatacgtgatgtctcccaaggacctgtgcaccattccggtgctggaccagcttctggacgcgggcgtttccgtgctgaagctggaagggcgcggccgttcctcggattacgtcaggacggttacctccgtgtaccgggaagccgcgcgggcatgccaggacggaaccttttccgcggacagggcggaagcgtggatgaaacggctggaatccgttttcaaccggggattctggcaaggcggctattacctgggcgtgaagtggggggaatggagcggttccgccaacagccgcgctgccctgttgaagatccacattgccagggtagagaacttttataagaagaacggggtggcggccctgttcctggaagccggcggcttgtccgcggggcagaccatcctcataacaggccccactacgggagccgtccgcatggaagtggcagccatgcggagggagacggtagagggcatggagcccgtagaagccgctcaaaagggagaaaccgtctatctggcggttcccgaacaggtgcgccgccgggacaaggtgtacctgctgcgcccccggatgctggaggatgcctgaatgtccggttgtccctttcttcctctgcctgctttttccaaagaccgggaatcgacggcaggatgattttaatttttccgtttcctgcccggctggggcggcggggcgtccggcttcagcagagggagctggctgagcatgtttctgatcttgatcgccaggcgcggcatcggctcggctatcgtgagggctgccacttcataacggacggcgatgtcgttgagcggacggaccacttcatggagtttcattcctcccggttccacttccactcccgcgatgatttcagccggggtcttttgaaattcacgtttggcttccggtctagaaatccgaatcaattaagttattcatttattgtctgacgtttgagagaaaatgccgtaaagtagtcttcctattgaatgaaaaagaatttccctggcgtattattttaaaaccgtatgccatgcctgattatatttcctttctgcgtcttttttcatgttcctgcgccttgctgtgtgccggaatgctccacgcttccggtttgcagccctggttgcgggagctggccgtaatcccgcctgcgccttccgcgaaagaaaaggatgcatggatgcggcaggtgtggacgcggacggcggagtatgcggcttccctttccgagcctgcttccgctgacgattgcggggatgcgatggttttgctggttcccgtatttcaggcgtggccggacgggaaggcagccggtgccgcgctggcggaaattctttccgttcccgtggagaggattggagctgtttcttcctgggatgacctggttaagcatcaggaagccattcaggaacgagtccgttttctcaggctgaagaagctggcggcctattatgattctgcggccatccgccgcgcggtgaagcgaaaccgggacaagtacggagaacggtacgccggtgcggaaggtttcctggcacggctggatgagtgggagaaggagctggggccgctggaccggtgggtggagcaggccgggccgggacaggcggccctgctgcgggagatggtggatctgcggagaaaagccctgattgaagccctgccggaacagaacggcctgaaggcatgggtgagcgtgcggcgtttcaatccgtccgggaaaagttctttcaatcatgaccgtccggcgaactggcagggtatttccagcatgccgggacccgggcgcagataccgcagcggcattgtgaaatttaacggggtttcctcttcttcccctgtggagcagctgctggcggacgaccgctgggtcgggcatctggatgttgatttttccggggagaagctcatgttcaccgggaacggattcggcaagaaggaaagcaggccctgggacgtttttgagctggatttgaaaaccgggaaaaaggaatcccttaccgcgcatatgcaagcggatacggacagctataattcctgctacctgccggacggccggattattttcgtcaatacttccggcatgcagggggtgccctgcgtggccggggtggattacgtgggcaacctccacctttacgaccgggaaaagaaaacgacccgtagacttacctttgaccaggacaataactggttccccaccatgctgccggacggcagggtgatgttcctgcgctgggagtacacggaaagcgcccactatttcagccgcgtgctgatgcacatgaatccggacggcagcgaccagaaggaatactatggttccaactcctactggcccaacagcttgttcaacgcacggcccctccccggcaggccgggcatgtttgcgggcattgtcagcgggcatcatggagtcaagaggctgggggaactggtcctctttgacgtgaacagggggcgcaccgccacggagggtgccgttcagaagattccggggtatggaaagcccgtggaaaacgtgaccaaagatcagctggtgcaaggattgaagactccttatttcgcagaaccttatcctttgaatgacgagtgtttcctggccgtttcctccccctccggcaaccagggcgtgaccaatgtggtctggtgcgacatatacgataacatcgttcctctcacggcctcctcctacttcgtctatgcagaccccgcgcccctggggccacgtaaaaaaccgcccgtgctgcatgaccgggtgaagacggaaagcaagacggctacggtttatatttccgacgtataccggggccgcgccatggccggagtgcccagaggggaagccaaggccctgcgcgtgtttatgtccgagtacagcccccgcaatacgggaagccactatgccatgggcatggaaagcaactgggacttgaaagtgctgtacggcaccgtgcccgtgaatcctgacggttccgccatcttcacggctcccgcctgccagcctctgacgcttcaggtgctggacggggaggggcgcgccctggcgctgatgcggagctggtttaccgccatgccgggggaaacgctcagctgcatcggctgccatgaacggcagaactgcgctccccccgccagggccgtcatggcttcccgccagaaacccgctcctattgttccgtggtacggtccggcgcgcactttctccttcatgaatgaagtgcagcccgtattggaccgccattgcatacgctgccacacagcggaaggcaaggcccgtggaggagtgccggatttcatgacattggaggccgtcaagggggctcccgcccccggttccgtctcttattggaacctgcacccctatgtgcgccgcaacggcccggaggggaactatctggggctggcccccacggagtttttcgcggatacgtcggagctttaccagctccttaaaaaaggccaccatggcgtggaaatgccgcaggaggactggaaccgcctggtcacgtggatggacatgaacgccccctatctgggtgaatggccgggagagcgcaatgaagggctgctgaaacgccgttatgacctgcacggcagattttcaggagcggaacgtaattacgtgacgatgaaggattccctattccggagaagcgcaggcgtttccaaacctgacgccgggaagcccattgctcgcgccggaggaaagagcgttcccgttccagaaccgcgtaatgaaacgctgactgtggatttgggcgacggcgtgaacatgacattccgccgcattcccgcagggaagttcaggatggggaatgaacgggaaacaccggcggaacgtcctgtttccacggtggggattgaaaggccgttctggatgggagaggcggaagtgacgctggagcaataccgccgcttcgacccggagtatgctaacggatggtatgacatgcattacaaggaccaggtgaggcccggctacgacatggatgccgatccgcgttttcccgtcatccgggtgccttgggccagggccatgggattttgccgctggctttccgggaaaaccgggaaaaaagtgaccttgcctacggaagcgcagtgggaatacgcggccagggggggagctgatacggatttctttttcggggagcgggatgcggatttttccgcgtatgccaacctgggggacgtgacgctgaaggaactggccgtttccggcgtggatcccaggccgattaaaaatcccaaccgtttctgggacttcgtgccgagggatgagaaatacaatgacgggaagctccacctggcccccgtcaagagttacacgccgaatgcctacggattgtacgacatgatcggcaatgccgcggaatggacccgttccgaatacatgccttatccctggaaggaaggggacgggcgcaatgaaggcctggactcctatgttccccgtgcggtgcgcggcggttcctggtatgaccgtcccaggcgggccacgtcctcctggcgctggggatatcccggctggcgtccggtgtacaacgtggggttccgggtgatcatagaagactgattgttgaaattgccatgaaactgacaaaaatgttccgcgcttctgcgactgccctttgctgcctgctggccctcatttcatgcaggcagggacaggatgctgcttccggccctctggctccggtggatgtgaaggtcgtcgatcacctggttgccgtgctggggcatgagagctgcgtgctggaactggtggaccctgcttccggggaaaaggtgaaaagcatccggctggcccagcctcccaacggaatggccgtggatggagcaacggtctatgtggcggaaggcggcccgcgcggagcagtagaagtagtggacctggaaagcggggcgttgaagcgttcttttcctgccgggcatacgcccatgtctcccgtggtgcggggggaaaagctgtatgtggcctgccggtttgattcccgcgtgctggaaatggacgccgctaccggaaccgtgctggattcctggaatgtcccccgtgaacccgtagcgctggccgtttctccggacggcaggaaaatctgggctgccgaccatttgccggccggggctgcggacggggatttcacggctgccgcgctgactctggtggaagatggaaaagctgtccatttcccgctttccaacgggacgcagggcgtgcgcggcatggcgataagcccggatggccgctatctggccgtggcgcatgtattgagccggtaccaggtgcccaccacgcagctggaccgcggctggatgaacacgaatgccgtgacggttatcgatacggacgagccggacaagcctcatcccgttctgctggatgacccggatgcgggggcggccaacccgtggggcgtttctttttccggagatggcggaaaactgtttgtgacgcatgcggggacgcatgaactctccgtaattgatttcccggccctgctggagtgcatgaagcgggaaggccggggcaatgagccggtttccgaaaggcttggtttcctgcacggtctccgtacccggatcgcgctgcccttgaacggcccgcgctccgtggcctccgatgggaaaaacgtttatgtggccggctacttttctgattctctggcggaagtctccctgaaggatgcctgcaaatccagggcaattcccctgaacggccaattccggccttcccgggaaaaactgggggaacggtattttaatgatgcctcccattgcttccaggggtggcagagctgcgccacctgccacccggacggccgggtggacggcctgaactgggatctgctgaatgacggcatgggcaacccgaaaaatacgcgcaccatgttcctttcccaccggacaagcccggtgatgacgctgggcgtccgcgcctctgcggaagtggccgtgacggcaggctttgtgcacatccagtttctggaaccttccggtgaattggcggaatgcgtgaatgcatacctgaaaaacatgaaggaagttcccagcccgttcctggtggcgcataccccttccaaacagcagacagggggggaggggtgcgcccagtgccatgctcccggcgtggaaaggggttccttgtccgaatctgcccggaggggcagggaagtgtttaaaacagccgggtgcgtgcggtgtcacccccatccttacttcactaccaaggaactggtggccacggggacggccacggggctggatgaaggtaaaagcgttctggtgccctccctggcggaagtgtggcggaccgccccttacctgcacgacggccgtgcgaagacgatccgggaagccatcacgacatgcaatccgggggatatccgagggaagacgagttccctgaataaccgtgaactggaggatttgatcaattacgtgcagtccctgtaaaggggcgggagggcatgatgacggcgaatgcacctgaacaactggaatggtccggaaaaaacggggcggaagaacgcttcttctgcatgacggcggagccgggcgcaagttttgaggaagaactgcattccctgatgaccaggtaccgcaatctggggggaggggaggaagatgaattcctgttgcgtttccatgtcagcgacccggtgcgccagtcggctgcgctgcggcggatgataggggagaggaactcctatgtttccatggttggccagccccctgcgaacggggcccgcgtggctctggaagcctggcacatcggcggaatgttgggaaaaaggcatatggcggaacagggcggaacggtcgtggaagccctccgcgctcattaccggctgttcctggcgggcaagagggaattctcctccccggacagctgcggccagatgcgggaggaattccgctggctggaccggattgccgccttacaggggggaaccgtgccggatttgattcaccgcacctggatttattgccgggacattgacaacaactaccggggattggtggaaggccgcaacggatgctttgaccgttacgggctgactccggagagccatttcatcgccagtaccggcattgaaggatgtacggagctgccgggccgcctgctgcatatggacagtctgggcatcgcggggctggagcccgggcaggtccggtacatggaagcgccggactacctgtcccccacgcatgtgtaccgggtggcctttgagcgcggcgtccgtattgtgtacggggaccgctcccattatttcctttccggcaccgccagtattgacgcggagggaaacattgtccatccgggggacgtggtgggccagacggcccgcaccctggaaaatatgagcgccctgatggaaaggagcgggggaagcctgtccgacctgaagcaggccgtagtgtacctgcgcgactgggcggaccgggaaacggtccggaaccggctgatggactctccgctggccgctgtgccgcatgtgatgctgaaagcccctgtctgccgccccggctggctggtggaaatagacggaatagccgttaatggagccggagagtccgcctttgcccccttgtaaaccctgccgttcccggaaccgcggcgcacgggcgatttcccttgttatcccgtgcacggaaatggtatcatgaaagcgcatgacttatcgccttaatacggatcgtctggtatttttttccgtgctgttgtgggtgctgttgccgccgggtgtttttgcctgggaagggaatcctccgggtccggataatgtgcggtggctggagcagttctgttccagctacatgcagtttctgaccctgggcggcgtgttgtgcgcggttattggttttgtgtgcgccgccctggtctggctggtgcatcgtctggactgggcgcggagcttgaaaatcagcgtgctgtttgtcatgtccatcctgtgcctggttttgtatggcggctccctttcctttgccgtgttttatcttcccctggccctgattaaccccgccgtgtattgtttcagcgtcggccgggcggaatgagcgtgcgggcaggaatggttttatctttcttttccgtggcggatatccgtggcttccttcaggaagacgacggtggcggcgatggttttggcaatgtctcctatccgttccagagaacggataatgaagagaaggttgacgttgagggaaggggagtcctcccgttcgggggagaccagaagggccagcgctttgcgatgggctttgtccaggtttttgtcgcgcaggcgtatttccctggcggcgtccacatcctgcgtttccagacacctggcggcgtctctgaattcggatacggccatttccagcagagggagcacaatatccggggagagggattcctgatgcctgatggaggacttggcatgcttggcgatacccgttacttcctccatgcattcctggagcttgtccccgcatcgggagaaagtgatgacgagcctcaggtcgcgtcccagcggatggaactgggtgagtacggaggagcagagggagagaacctgccgggttttttcctgcagcgggtcgctgtccgcaatgatgctgttggccccgtcgctgtccgggccggaaatgacccgttccagaatgtccatgtatttcagcaggctgccgcagatggcattgacgcggaggcggatagcgttcagggccgcgtcgtagtgggggaggatgtgattgccgggggatgtcatgaggagaatggtttggaatgggcttttagctgaaacggcccgtaatgtaggcttccgtttctttttccgtaggattggtgaagatttgggacgtttccccgtattccaccaggcggcccatgtacatgaaggcggtccggtccgcgatgcgtgtggcctgctgcatgttatgggtgacgatgacaatggtgagttcttttttcaggtcttccatcaggtcctctatttttaaggtggcgatagggtccagggcggcgcagggttcatccatcagcaggatttgggggcggttggcaatggcgcgcgcgatgcacagccgctgctgctggccgccggaaaggccgtaggcgctttcatgcaacttgtctttcacttcatcccacagggcggctcccttcaggcttcgttccacggtttcgtccagttccgcgcgcctgttgcggccggccacacggaggggaaagacgatgttttcataaatgcttttagggaaagggttgtatttctggaagaccatgcctacgcgcttgcgcagggagatgacttccacgcgcgggtcatacaggctggtgccgtcaatgcggatatccccctggtggtgcacgtccgggaccaggtcgttcatgcggttgatattgcggagcagagtggattttccgcagccggagggcccgatgagggcggttacccggttggtttcaaaggtcatgccgatgttgaagagaacctgtttgctcccgtaaaagaaggagaagtcttccacttcaatgatgggctcgtcgtctgcggcggctggttcagtcatgggatggtgaaggagaatggggttagaagctggaggccgcgtattttttgcgcaggcggttgcggatgaggatggccgtgaggttcatggccaccaccagcaggatgaggagcagcgtggtggcgaaaaccatgggctgggcggcgtccgagtccggagactggaagcccacgtcgtagatatgaaagcccagatgcatgaatttgcgttccaggtggatgaaggggccttccccgtcaatgggcagggagggggccagcttgaccactcccgtgaccatgagtggggctacctctccggcgccacgggccatggccagaatgaggccggtcatgacgcccggcagggcgctggggaggatgatgcgtttaatcatctgccatttggaggccccgcaggccagggcagcctcccgcagcccgcgggggacggcggagagtgcctcctccgtggagacgatgactacgggcagcgtcatcagggccagcgtgagggatgcccacaggatgccggaggtcccgaaggtgggggtgttgtccacagccagctttttccagtagaaaagttcgtcgatgctccctcccagatagtaaacgaagaagccgaggccgaaaacgccgaagacgatggaaggcacgcccgccaggttgttcacgcagatgcgcacggcctgaaccagagtcccctgtctggcgtattccctcaggtagatggctccgatgacccccacgggcgtgaccagcacactcatgagcaaagtcatgatgaaggtgccgaaaatggcggggaagatgccgccctccgtgttggcctcccgcggatcatccgtgatgaaatggtacaggttgtggaggaagacgccgcattttccgaagaaccccaggtcattcggctggtagccgtaaacgattttatccatgcggatttctttcttttccccgtctcccagggcatacacaagagagtctcggccctgttgagccctcagtttggctgcttccgcggtgtaccgggcgtattcggcattgagctgttcctctttggcgcggagccggtccagttcaccggccgggtcgtccatatccgtgagaatggggtttttcctggggacggccgtacgccgtccgttttcttcccggatgtcgtaggaacgttctatggccttgatatccagtctgacgtccgccagacgggtattgacggagccgatgtccctggtgtcaatggttttgaccctgtccctcaggtctgtttcccggtccagcacgcggcggaaagcctccatgaattccggtgaggcggcggggatggtttctccggaggccagcttgagttccagaggtttgaccagggctttccctccctccatgcgttccaggcacagaaggcctttgggggtggcggaggcagtgacattgtgcgcgtccacatagcggtaggattgtccataggattccttgctgccggtgaaaagctggtattcccgcacgtctctggctgtggagccgggatgggcggggtctgcggggacgtggcgcgtctggtcctttgtgatgccggcgtacaggataagcggttgttcttcttttgaagaaggggcgagcgtcagttcatggatggttttgggccagaaggcctccagaccgttgaagacgatgatgcccagcaggccgaaaatcatgatgaggcccagggagagcccgatggaggcgagccagatattgacttcccccaggggacgtttgggggcgggcggaaggctgaagtcctgtttcatggaaggtggatggatgggagggaaagggatggatggttcacacgacgttgaagcgtttgcggagacgctggcgcactatttccgccagagtgttcagaatgaatgtcatggagaagaggataaggccgcccaggaagaggacccggtagtgggtggagtcctgcgccgcctccggcagttccgtggcgatgttggcggagagggtgcgcatgccgttgaagatattccagtccatgatgggggtgtttcccgtggccatcagtacgatcatggtttcccccacggctcggcccagacctatcatcaaggcggagaaaatgcctgcggaagccaccggaagaacaacagtgcggaccatctgccagcggctggcccccagagcctccgaggcggcgatgagggaaggggggacgttgctcagggcgtcctcggaaatggtgaagatgacagggatgacggcaaagcccatgatgaatccaaccaccagggagttgcgctgttcatagggcatgccgaagccgttgcgccacaggtctgctaaactggcggcctggaagtccccggcgccccacaggcccatgacgctgcggcagaggctgatgaggggctgttccagccagtagcccaggtattcccagcagaaccaggcgcagagcagaatgacgggggtcatgacgatgtattccacaccgcggctgaatttgttgcgccaggctgcgggccgggtggtccagaaccatgcgatgagggccgccaggccgggaatgaggacggccatgcagagcagtgcggggactttgtcttccattctgggggccaggtaaagggcgccgaagaagcccagtactacggaaggaagggaggccatgatttccatgacgggttttaccacccgtttgacggcaggggccatgaagtgggccgtgtaaatggcggccgtgaccgctaccgggacggcgaagacaagggcgtacagggtgcctttcagcgtgccgaagaccaggggcatcagggacagcttggattcataatcatccgtgccgcccacggattgccagagccatttgggagaatcgtacccctcataccatattttcccgaccagggctttggcgcctacttccgggtgcttgtcttccagagagaagaaatggatgtttcctgatgggtccacggcaatggcggcgttgaattccgcattggcggccagttggaccggaacgaattccagaggtccgctgttccagcggatgtcggccgtggttccgtagcagagcctgagttcccgcggagtggagaccaggaaggaacggttgatgccggatgccgcgtaatactgcaccggaccgtccatgggagagaattgcctggtctggccgaagaggcgcagggaagtgccgtccaggcgggaatggggataaaggctgaaaatcttaaggcttcccctgtcgcctcctatgaccagggacatgtctccgaaaagccagttgacggaagtcattttttcccctttccccagcggggtcggaatcatctggcgtctgacccatgtttctccgtcttcatcataggagaagtaaagaagtttgtccgcgtccgtagcgatgacgaggctgtctccggaggctccgggcagcatggccgtggggcggccttccagctggtccgtcaggtcatggaatccggaaggcgccagttctccctcatgaagcagggagcgggattcttccagcgtcatcagcaggaggcgcgtgccctgttccgtctccacggttgcggtaaatattttccgttctcccgcgtccgcataggctatgccggatattttgccggggacggagccgttttccgtcagggggtagagagggccggcctccgctccggctttgtccgggccgtgggcattcgtccggccgtggacgttgagtccggaatgaacatggatgaggcccaccttgccggattccgtggcgatggggtaggcggtaagggatgcgtcataggaatgggcgcagacggtttcgccgtccggcagggaaacgggaacggaggacaggttcccggtagttttgtccaggaagaagatgtttttcccgttgccgtagacaaagggaagcgtgccggaagggtccaggccccaggttcccggaaccggagaggagggcgcggggtgctgccgttcttccacgtccgcgctctggaagagaggaatcgtaacggccagcaggaagaaaagaatgccgaaaacggctacaatgacggtgaatcctccgccgatgatggttttggtcatgatgcggtcaaaccacagcgtggtttttgccacctgaaagcgttccggaacgggtttgggctttctggaaggtgcgggggagggagcattggaactcatgacggcagagaggagaagttggagggcaggactccggcgggcgggccggagtcctgccccggcatgtgtttacggcacgggaagggagtgtttattcaatgctcttgagcacttctgagctgactttggcgggaatcgggtaataaccgtccttggtcacgatttcctggccgtctttggatacgatgaatttgatgaattccctggtcagggtgtccaggggttctcccggtttcttgttgacgtaaatcagcaggtaacgggagagcgggtatgttccgttgatgcagttatcgtaggaaggctgtaccgccgcctttccgcttttttccgccagggagagggtttttacgccggaggtgacgtatccgatgccggaatagccgattccctgttcgtcggaactgatgccctgcacgacggcggaggaaccgggctgttccttcacggagtttttatagtccccttttttcagggctatttccttcacgaacccattcgtgccggaggcgctgtttctgccgtaaatggagatggcttttcctttcatggagggcactcccgcatcgccccagtcggtgatgttggagccgccgcgcttgaaagtggaggagaaaatggagtcgatctgcgccagggtaagggcctggatgggattgttcttgttgacaaagaaggccacggcgtccagggccactttgatctccgtcggcttgtagccgtatttggcttcaaaggcggcgatttcctcccgcttcatctggcggctcatgggggcgagctgggccgtgcctgccgtgagggcgggcggcgctgtagaagagcctttgccttcaacgccgactttgacgctggggtattttttgctgaatccttccgcccagagggtcatcaggttgttcagcgtatcggagccgacggcgttcaggttgccggaaacgccgctggtgggcgcatacggcttgatgctgctgtcaacggtcacttggttggagcccatgctcagggagctgagggcggcggcgatggtcaggattttggcgacaaatttcatggcgtcttttttggtgtgttgcgtcttccgtttccgtccggcggggccgttcatggcggaagacggggtagtgataccctcccgcccccatggtgaggaagagaatcctggttaagaaatcgtcacaaacccggagtagccagggagccctgtttttgggataccatgcgtccagaggcgcaggacgcgccattagaagaacatgactccgcatccagcagcagccgaccagaccgccgtagaggtggattccctggatttttgttatgggagcaagcaatccctgttcaacgtcaccatgaaagtccccaggaacagggtgacggcgttcatcggcccttccgggtgcgggaagtccacgctgctgcgctgtatcaaccggatgaatgaccgtattccggaggcgcgcgttacgggaggctccatccgcattgatggggtggacgtgacttctccttccctggataccattcgtctgcgccgggaggtgggcatggttttccagaagtccaaccctttcccgatgagcatttatgagaatgtagcctacggattgaagctggcgggggtaaaaaaccgcggcattctggacgaggctgtggaggaaagcctgcggcatgccgctctttgggatgaggtaaaggaccgtctccatgcttccgccaatggtctttccggcggccagcagcagcggctgtgcattgcccgttccattgccgtgaagccgcgcatcctgctgatggacgaaccctgttccgccctggaccccattgcgacggtgagggtggaagagctgatgcaccgtctcaaggacaagtttaccatcattgtggtcacccataatatgcaacaggctacgcgcgtttcggacctgaccggttttttcatgttgggcaggctggtgggaattgatgctacggaaaagattttttccaatccctccctgaaagaaacggaggattacattacgggaagattcagttaacagagagacgattatgctttttccaaagaatatttccaaaaatggaaccgggcgtgttctccatgttcccggctctggacgaaggctggctgccagcgccgccagaaagaacagcctgcgcaggcagcatcttttttatcatgccggcaaaaccttatccaatcatcaagccaatattccgaatcatgaatcacgacgcgcacaccctgagggagtttgacgccgccctttcctccctgaatacgcatttgctccagatggcctataaggcgcagagcgcccttgatttggccgccgccgcccctttgcagcagaatgagtcttccgccaaccgggttattgctgatgacgaagaattggacgagctggaaatgacggtggacagggaagggctgcatctgctggcttttttcagtccggtggcttccgacctcaaagtggtgctggcttccctgcgcatgtcctccatgtatgaacggattggtgatgaggccgtgaccatcgccaaaagggccaacaggctgaataagcgcccgcgcatccgggaggctgccttggcggatcctgtctatcgggaaatggcggagcggttcagggctgtgaataaggctgtttcctcctgggacggggaggctctggcggagcttgcccctgcgctggaggatttggcggagcatgcggcgtccctgacggaggcgtttgcctgcttgcctgagcaatatcaggacaatctggtttccgttgcggatctggtttttgtgagccgttccctggaacgcatcgcggaagggctccaaaaggtagcggcggaagggctttacgcggcctcctgatgccgcgttcctgcacaggaaagcccgctgcaggcgttgttgaagcgccgttttttgttcggaaacgggattcaggcatgccgcctatctgacagtccaggtaatgctgcgcgtggcggattggccgggacgcagaatgacgctggggaagtggggggtattgacggcattggggaagccctgggcttccagcgctattccctggcgcgcctggggcaggtattccccggtatatacctggaggccgggagcatccgtcgccacaatcaggcggtgccgggattccgggtcaagaaggatggcggcgattttgtcgcccggttcggaatccagcacgtagttgtggtccagtccggcggcggtgtccgggtgggcggcggagttgcgttcccccagcagggctgctttccgcaggtcaaagtccgttccttccacgggaagaatacggccgtcggggatattggtcgcatccaccggagtataggcggaggcccgtacctccagagtcatgaaatcaatggtgggtttgccggacaggttccagtaagcgtggttggtgaggttgacgattgtggctgcgtccgcatacgcttccaggcggagatgaagggtttcttccaccacggtgtaggtggctaccacttccaggttgccggggtaattttcctcaccgtctgcggagtgcagggtcagcaccagcgtattgcgcccggcttcctgcacctgccagactttgctgtcgaacccctggatgccgccgtgcaggtggttggggccgttgttgacggccacggtgcgggaatccccgtcaatggagaacctgccttttgcgatgcgattcgcgacacggccgcaaatcgcaccgcaataacaggtgtctttcagcatgtcttcaaagtgcttgggccctacgatcatgtccatgccgtccttgacgacggagatgatgcgccccccgtagttgctgatgcgtaccgtcagcttgtcggaagacagttcaaacaattctacaggtgcgccgccgggtaaggtgccgaagatcatgccggtatatagcttggtcagtagtggatgtccaattaataggccagcacgcgggaaccgttgttgccgatgatcacgcgcacgcgctgtccgacctgaatcgggttgttcctgctggcgacctggacgaccgtgtagttgcgggtgccgttcctcttctggtccagacgcacggtgatgcgttccccggtcgtgttgttgacggccttgtcaatctggttgccggcaatgccgcccagaatggcgccgcccgccgccgtcgcgaatttggcgttgccgcccccgaacatggcgccggtcaacccgcccgccacggcgccgattccggtgccggtgttggcgttattggcctggatcttgacgttttccacgctggtgaccgtgccggtataggtttcctgggctccgccgatttcgttcaggttataggtgttcggggaaccgaagttggtgcaggaagtaatggacagcgccatggctgcacagccgatggtaagaatggaagctgttttcatgatgacgatttataaaatgggttgaaggttaagatcaagtaatttcgcagtcaacggaaggggctcggctgccctcttccggcggagaaaacccttgccggaaggttccggcaagggttcttatttattttaacggtccgttgggtcaggccttgggggcttctccctttttggggcagtcgcagggcttttcccctttgctgcaaggctggccgcatttttctgggcatttgccttccttggcgcatttcctggggcactttttatcttttttgcagcacttctgggcagcaggggcgggggactccgccggagcggcggcttcctgagcgtaaccgttgacactgaaggcgaaagcaaaggctgctacagcgaggatttttttcatataatgatatgtgaggttgtgtggtgttggtaatgcagcggcagaagagctgccgttctacgacagatagagcggcagggagtgatttttgttcaaaaaaatacgcggagaggattctttttagggcggtttttttgatgaggacgcgcttttggcctccggggtaagtttgacagtccgggggcacgtacggagcgcaagcttgcatggggcgccttcttgaggcacggtagggaacatgagttcagccaaggaacctgtgacgcgccgttttggaaatggtttgacggttttgattaaggaggacaagtctcatcccgtagtgtccctccagtactgggtaggcacggggtccatgaatgaggggcactggcaggggagcggactttcccatttgctggagcatctggtgtttaagggaacggcgcatttctccgggcaggaactggcccgcaaggtgcaggaacgcggcggccactggaatgcgtacaccagcgtgaaccgcaccgtgtactatatagacggccctgcggagtcctggcagattttcctgaatcttctgacggagcttgtatttttccccacgttcccggaagacgagatggagcgggagaaggaggtcgtgcgccgagagatggccatgtatgcggatgatcccgattccgtggcctaccagcttctgatgcagacgctgtatctcaaacatccccgccgctggcccgtgctgggtgagcgcgccgcctttgactgcctgacgcggcaggacgtgctggattaccatgccagccgttatgtcccgaacaacgtggttctttccatcgcgggggacgtggatgccgcggagattctttcccatctggaattgctggtggaagacctgaaatcccgtcccctgaaccgggaacccattccccatgaacctcaccagttcggttcccgcagggtgcggaaggagtttgccgtgccttactccaagctgcaccttgcctggcgcctgccctgttccgcccatccggatacgccagccctttccgctctgtccagcattctgggaggcggacgttccgcccgtttttatgaaaagttccatgaccgcctgggcctggtgtacagcattgaggtgcattccaaccagtctgagacggatgaaggggcgtttaccatcagcatggacgtggaccgcgcccagcgcgacaaggtgcgggatctggtgcttcaggagcttcgcaatctggcggaagaggattttacggaggatctgaagagagtctgcaaacagacccgggtcagtcgcctgcgccgcaggagttccgcttccggggtggcctcggaaatgggggcggactggttcggctcgcgcaatttgaacctgtcttccgaatggcaggaagctattgaacgggtgactacggaagatttgcaccgcgtttgttccacctggctgtcttccccgaatgtgacggaagtcagcctggaccccccgggcagcaacgccggggatgaagaaagggcctccgcctctgcgggaacggccctgagcgagcatgttcttggcaacggcatgaaggtggtgatccgtgaagaccatcgcctgccgctggcctatgcctgcatggcgttcaaggccggatgccgtgcggagaatgagcatgacgccggggtgacggacctgatgtccgagtgcctgctgaaaggaacatccacccgttctgcggcggatatagcccgttttctggaggacatcgggggagccatcaacacgtccaccggtaacaattccctgagcgtgggatgtcaggttctggcggaagacctggacgccggattggagctgatggcggatgtggtcatgaatccgtctttcccggaagacgcctttctgagggaaaaggaatcttttgtggcggatgcggaggaggatatggaagaccctctttccgtggcgttccggcaggagcggaaggtggcttacgggcatgtttcctatggaaattccccttccggcacgccggaaagcctgtcttcactgacggttcaggacatcaaaaaacagtatgaacgcattatctgcgcttccaacgccgtgatttgcatttccggagatgtcaggaaggaggaggtcctgcctcttctggaaaaacatctgggaggcatgagggcgggaacgcctccggccctgactcccacgcccgcgctgcgggccggccgggaagtggccgttctggataaacagcaggccgtgctggtagtgggggtgccgggcgtggacgtggcttccccggagatggcccaggctctgctgttccagtcctggtgcagtgatatggccggtcccgttttcaccaatatccgggaggaggccggactggcctattatgccagttcttccctgttcatcggcatggatgccggaggcatctgcttctatctgggcacttccccggaacaattggaggaagccgggcggaggctggaaaaaacactggagatgattgatgaacagggcatgacggaggaggagctggaacgcaccagggcggccgccctgtcttcccgtctgctggccatgcagtccaatggaactttgtgccagatgctggcgctggatatcctgttcggtttgcctctggaagcgtttgaacagcagacggacgctatcaggaatatggatctggcccggatgaacgcctttatcaggaaggtgctggatcccgcccagccgcgttcctggtccatcgtgcgtccgcctgccggggagtaattccccggaaaatcatttcctttttccctgtccgggaaaaaggcaggattaaataaaaaggaatatttttgcgttacatcatctgaaggctgggggaggggtgtagcggaatcgtgatttttatttcagtggtgatgcgctatagtggcagccatgactgagatggagccggacaggaaaactgcggaacgggcaatcagggaagcgtatgaatccaacccggggggctgggcggaacattcccgctatgtggcggaagcctgtaaaaatatagcctcgcgctgtaaagggttatccggtgaaaaagcttatgtcctggggctgttgcatgatattggacggtatgccggagtaagttccgaaaagcatttgatagacgggtaccgctattgtgcggcaagaggctggaaaaaggcggcgcagatttgtatttcccatgcgtttatgatacaggatatcaatacttccatcggcacgtttgacgtgagtggggaggattacctgttcatgaaaaattttgtagagaacgcggtctatgacgactacgaccgcctggtccagttatgtgacgctttggccatgccgacaggtttctgccttttggaaaaacggtttgtagatgtgacaatccggtatggagtgcatccgtttacggtggaccggtggaaaaaaattctgcagctcaaggcgttctttgagaaaaaagcgggctgttccatttatgagcttctgccgggcgtcgttgaaaacagtttccgccaggaggaaagccatgcgtgatgaagcggaagattttttggaaacggcgcatcccgatgcgctaaggcaaatcgcccgggcgagggaattgacaagggaatattatttttccgcatatagtgatacgcggagaagaagtgaaattctccgggaattactgggtgggattggggataacgtgatgatagatacgccctttcattgcgactacgggaaaaacatctttttagggaacaacgtggtcatcaacatgaactgcattttggtggataatgcgcccatccgcattggcagccaggtgctgattgcatccaatgttcagatttatacggcttcgcatccggtcttgccccaggaacgccttgtgacggggtggaaaaaaggcaagggaacatttttccgcacctatgcactgccaatagaaattgaggatcaggtatggattggaggcggcagcattctactgccaggtgtgaggataggaaaaggctgcgtcattggatcgggaagtgtcgttactcattctgtgccggcgctgcgttgctgttgggagtccatgcagggttatcaggcgtttttgacatcaacggctggaggccgccgcgggaggcggcggattcggaagcgccccttttttcatggcggaatgttttcggttcggtgatgcggcaatagtagggtttgactattgttgcgaccgacaggatgatctccttatcggttagggtcagcaactcccattgccgctggtggttcgacgagggggggagcccggcgttgaggattcgttccagcatattccgcgcaatgggtttgtcctggaactctcggatgctgcgacgtttttcgattacttcataaaattccatgatacatcagcttttgattattacgggttcatgcctgcggcggcttgtagtgacgagatacacacccgtgaatacaagcaacagcgaccccagctttaagattgaaaatacgtcctgaccgatggctatcgcaatggcgcaagctaccatcggctgaacgtaattgtacatgcttaccgttgtcggtcggaggcttttcagagagcaggtgacaagcagaaaggcgatgaatgtggagcctaccgtaatataaagcaacccgtaaagttgcatcggtgggaatgccgctgcgtgaaaaacggcaacattttccagttctccggctgaaaacgggaataacgccacggtcgccacgaggaacatccacttcataatcgtctcggctgaatagcgttgcgccaaggatcgcgacaacacgaggtaaagggaataaactatgtaattgacggctatcattgcatcgccggggagactgctcccgcccgatgtagcatgcgcggtgccgaatacaagcaacagcccgccacagacgccgagcatcacaccgagcacctttcttttcgtgacaggttctcgcagaatcacggcggcaagcaacaaggcgaatatcggagtagaagaggcgatgattgacccgtcaaccggcgatgtcatcttcagccccaccacgaacaggagctggttgatgcctacgccgcagatgccgcacacggcaagcaaccccaaatcgcggtgtgtcacccgctgccgaggcaggaaaagggacaacagccaaaacagggcacatgtcacggctgcccgaagaaaggcaatggcctcgggcggcataccggtattcagaaggtgcttgaataccggtacacttatgccgaacaagatattcgctgtcaaaatgaggatgtgtcccttcatgctgccatatttatttccaggtattcatatgtattctatcttcaacatggatttccttttgtttggggaggaaagcattttcgacgggatagcccatcgtcagcaggcaggtgaattcatactcatcgggcgctcctactatctccttgattttctccacttcgtcggcaacaggaatgtggaacacagttcccagtccttcattcgttgctgcaaggagcatattctccacggcacaccaggctgaagcgaagtaattcagcgagctttgttccaccggtttcagcagttgccacgtcttttgccggaagaacgggatgatgagcaaaccgctctgcatcagcatacgctgttgtttgggtagggcatcggcaaacatatccatcttatccttgtcgcccgattcatccacttcatgcaccagattcttgaatgccgccatatttttggcaagcgggtcgatcaccttggctatgttttcacgtccgcgcaccacaacgaactccagttggcgcaggtggtcgttggtaggcgctttgaaagcggcactgatgacctgttttacgatttcgtcactcacttcccggttggtgtagtcgcggtatgtgcggcgcttctccaatacttcattgaattccatattacgatgttttttagttatgttttattatggtatatatttacaataaaaagctgaattgtttttgaatgaagatttcaatgccatgtagcgaattaacttttgacatcaatagctgaaggccgccgcgggaggcggcggattcggaagcgcctcttttttcatggcggaacgtttgatctgctcatggtaaaagtaattcacgataaccggcggttcgttgaacggccggtgcatggaatcgtcattgcgcagatacggcaaaccccgtttttccgccagctgccgtattgctgcgtccagtccttcccagtagccgcggctgcctttctggtaaatttcccgatagaggggcgccagatgcggatagcgtttgttgatgtactccagaattacggatttgtagctgccccgcagattcaggttttccagccagatcagattgcatttgtcttcagcctgctccacaatcgccggaatatccgtaatgcccggaaaaatgggggagatgaagcaggtggtgcggattcctgcctcatggaaggccttcatggcggccagcctccgcgagatgctcaccgccatgtccatatctgcctgaaagcgctcgtcaagcgtgttgacggaccaggaaacgcgggcatggggaaatgtttttatcaaatccaggtcccgcagcaccaaatcggattttgtagctatactgatttccgcgccgctgccttgaagctgttccaggagcgcccttgttcttttgtagatttcttcctgaggtccgtaagggtcggtcacggaaccgataaacagctgttttcccgcgtatttcccggggttgcgtatttccggccagtatttgacgtccagaaaggttccccatggttccggatgaccggtgaaccgtttcatgaacgaggcgtagcagtatttacaggcgtgggggcagcccacgtaaggattgaccgagtaatcggccacaggcagatttgacgttgacaggatgctctttacctgaatttcccttactttgattgcatcagcgttcatggttttaaaaagctcctttgcattccctgctgcacggtatcggaagggcgcagatgccccagcagcaacggagagtccgggtcatggagtttgtaattttcacgggccttttgccggttcgtatttgcatagcagtatttgcagccgttaaggcaggtgtcatacgctcctatgtcccggctctcaatgcaatggcagccctgccgcattccttgatgtttcaggttgcggaattgaacgccgttggcctgtcccagaatgttcagggtcatgcagccggaggatgaaatgccgtaacgcgtgtaatcgccattggttccgcaggtttgaatggggattttatatttggccgcgattgctcccagcccggccgccagctcctccttgtctttttccgtgagggggattagttccggcatgttggtttgcagcttcctgtacatttccacaaagctgaaaatgcagcggtcgatgtggccggataagaaggacgccatgcgttcaaaggtctccagatgccttctgacggtatattcacttgtcagcaataccgggtcataccgccatgcgatgcggtttgctccgacaatttccgaaagttttgccagcgtggccatgctttcatcaatgccgggaacacccggttctatttcctttccgtaggccgtaatcgtatagtggaagtaggtatggaagcgctcggtgatgctgttgatatgcggaagaatgggggcataatttttagagcagaagacaacacagtccacttggtccggcgtcagttcataacgagtcaccttatgttggaacaggggattgcgggaaaggacatagccttcttcaaacctcttcagcagccagcgggtgtaatactggacggtgtccgtccgtcctcctgtattgataatcatagcgtgtttttgttgatggattgaaatttcagacgcatttgttccgaaaaaaggtcggttaaacgaaccagttccgcttgctgttctccactcaattccgccatggcgtcgttttccgcctgcgcggcaggggggatgatgcgttccacgtattcctttccggctgcggtgaagcgtatcaacctgattctccggtcggttttggattcttcaaaagaaaggtaccccagcttccagaattttttgatggcggcgctgacggtttgcttcgtggcggagaggcgttcgcaaatcccggcctgcgtgcagccgtcctgagcgaaatagatgatatccagaataaacagctctttggtggtcaacccatgttttctggcgtattccgtatagacggcatattgtttgtcccgcagccagcagtagttgtttacgtggatattgacgctctctttgctcataggcggagatgaataaagtatgatatttgatggtctgatatttgacaaaaagaatgtagctctttacgcgttttttgtaaagccccaaatataaagttccagataaagaggcgggggatagggacggctttttgcgcggccaggcaaatttccggaaacggtgcaggcgcggcaatggctgccggtctttcaagaatccgggacgttttccgtttttattcccgtatcttctgtttcgcggcagaagagttttttttgccgcatggcttcggaagacaggcgcctgtggctgccggggaaacgtttttccgtgttcacgggagttggagagcttgcccggcggggcttttccgcaccagggcaagttccgcctgctccggtgacggatgtttcgccggaggcggagagagagcgtggagactcaataaaaaacgcaggcggcgatgcgcctgcgtgatatccggcgatggttcggacagaagaaagaagcggtttttctgccggatggtatttgtgtaaaacggcatccgtccgcttcctgaagaacgggagatgacccaggggttcccagcaattccgcttccggagcgggaacggtatttggaaaaaagtgcggtaccttttttccgttcctcattttcgccgccccctgagaaaccccggcgcgcttttacgcttttggagaagcggcccgtacaaggcaggcacgccagggaagaacagaggcggctgttttttagccgatttccgtgcggcccagcaggtgggcgccttcctccatggcgaggctacgtgtcttcatgtccccgacgacacgggcctgctgcttgagttcgcagcggtcagaggtgaccttgccttccacgttgccgtagatgcggacgtctccggcagtgatgtctcccttgatttgggcggtttcaccgatggtgacttttcccttgtcggagatgatttcgccttcgattttgccgtcgatgtgcatgtcgttctggaaacggatggttcccttgatttcgatgccggaggcgaggaagttggttacgttgtctgtcattgtcgtaaaatggttggggatgggttaaatggtcatgatatccttttccttgacggccaccagctcgtcaatctccttcacgtatttgtccgtcagcttctggatctgcgtttccagatcgcgctggccgtcttccgtaacgatgttttccgtcttgagctttttggcggaatccatggcggccttccgggcgccgcgcacgcgcacacgggcttcttccgcctgggatttgacaagcttcacaaggtctttgcggcgttcttccgtgagggcgggaatgggcaggcggatggaacggccttccaccaggggattgaggttcagcttgctttcattgatggcgcggccgatgtcgtggacggtgctcggatcaaagggctggatgaggatgagacggggttccggcgtgctgatgacggccaggcccttcagtttcatgacggagccgtagctggagacatgcacgtccaggttttccacgaggccgggggaagccttgcccgtgcgtacgccggagaattcctgtttggcgaagtccacggccttgagcatggattcctccgtttccaataataatgtttctgcgtccatgatgatggtgggtgctaagtgtttttggtgggttgaaaaggaatgcggggttcagctgatggtggtgccgatcggttccccgagaaggcgcgcgtgatgttgcccggcgtatgcatgtcgaatacgatgatgggctttttgttgtccatgcacagggtgaaggccgtggagtccatcactttgagctggcgttccaggcattcctgataggagatggtgtcgaatcgcttggcgccggagacttttttggggtccgcatcatacaccccgtccacggaggtggccttcatgaccacttccgcattgatttcgctggcgcgcagggcagccgtggtgtccgtggaaaagaacgggttgccggtgccggcggcgaagatgacgattttattgttgtccagatacgagcgggccttcaggcggatgaaggattccgcgacatttttcatttcaatggcggattgcaccacgcaggggacccccgcgcgttccagcgcgctttgaagggccagggcgttcatcacggtggcgagcatgcccacgtaatccgccgtggcgcggtccatgccgcgcacgctggctttcgctccgcgccagaaattgccgccgcccacgaccaggcctatttggacgtcggcgcggtgcgcctgggcgatttcttcagcaatgcgggcgacgatttccggggaaatgttgtccatgctgccggggctgcgcaaggcttccccactgagtttcagaaggattcttcgataggctggtgcggatgtgtcagacatagatgcggattttacgcagacaagattgaaatttcacggggcaaaaagaaagcaaaaagagattccttattgatttttctccggaggtccggagatttccaccttgatggggcttctgctctccaggctgcgggtggggaaggggaaggaaatgccttcttcctcaaagcggcgcttgatgtcatgggcgagcgttttctggcagtccaggaaattgtctttccggcaccaggcccctacggtaaagcccagggaagagtcctggaaccctgaaaacgagatgaggggcgcggggtcatccaggcagaatttgttttgtttgaccacttcccggaggacgttcacgacatgctcaatgtcgcagttatagtccacgcccaggctcaggtcgcaccggcgcgtggaaaaacgggtgatattgctgaccggattcttgatgattatttcattggggatgcgcaccatggtgttgttcggcagccggagctggacggacatcaggttgatggagtccacgttcccggtgattccattcacttcaatcatatcccccaggttgatctgcttttcccctaccaggaagaggccgctgatgatgttggacagggaggtctgggaggcgaagcctacggcgacgccgatgatgctggccgcgcccagcagggtcaggatatcgaaccccatcagggcgaaggcctccacgcctataataatgtagccgacgtttttgacgatttttaccgtcaggcgggaggcctggggcgacattttcaacgcagtgattttccggagcacctggcagaacagtttcaggagtatccagctgatcaccagccataccgccacatgcaggattttgactcccacggactgcaccatttccagcttgagccagtccggcatgttcaggaagtccatggtttttgtccagatatcttctctggaggatgcgtctgccatgagattcatatgaaggatgtagcagacgcttctccccggctcaaggggggctcgcgtattccccccggtttatgacagttcctccggcagcggaaagggcagggtgttcaggtgcggaggacgtacaggttcatcccgcagaagggggggcggtttccggcgcaggaaaggcggcggatgcatggccggatatggcgcctggttgggaaagaggggaaggcggggatgaaaaaaggccgttcccccggaaggggagcggccttgaaatattgccgaggggactgcttacttgctgaggtaggaggccacgccttcgtgggacggggtcatggccgcgtctcccttgtgccagccaagggggcagacttccccgtacagttcgaagtgctggagggcgtcaaccacgcggatggcttcatcaatggagcggcccagcgggaagtcgttgatgagctggtggcggacgatgccgtccttgtcaatcaggaagaggccgcggtaggcgatcagttccccgttgacttccacattgccgtcttcgtcaatttcctcgtctccggccagcacgccgtaatcggcggaaatggtcttgttgatgtcggagacgatggggtaggtcacgccctgaatgccgccctggctgcggggggtgttgatccaggcccagtgggagaattcgctgtctgtggagcagccgacgacggctacgtcacgcttttcgaattcgcccagggcttcctggaagccgatcagctccgtagggcacacgaaggtgaaatccttcgggtagaagaacaggatcacgtactttttgcccttaaactggtcaaggctgaaatccggtacgatggtaccgtttactactgcgttagcgctgaaatgaggtgccggttttcctatgagaagcatggttgttttttggtttggttctaaaagaatgattccaaaaaacggacgaaagtcaagcggcaatgatatcccgttcgttccaaaagagcctgttttctcttgaaaatgaagctttttttgtcagtattccctccatgtcatcctcaaaggtgcaacaagacgagtggtccggaaaaataggcgtgattctcgctgtggtcggcagtgccgtcgggctgggaaattttctgcgctttccggggctggctgcccaatatggagggggcgccttcatggtggcttacggcctcatgctggttctggtgggcgtgcccgtggcgtgggcggagtggtccatcgggcggcgcggcggccagatgggcgcccattgcgcccccggcgtgttctggtacctgaccaaagggtccaggctgtggaagttcctgggcgtgctggcggttttggggccttcttccgtggccttttattacatggtggtggaagcgtggtgctgcggctatttctggaagatgctcacctgcccggaggtttttgccacggcggaggggacggcgcagacttttttcagtttcacgggcatgtacggcgacgggagcgccctgttgtcggacaacggactgctctggatcgtcagcggggtcatccttttgaacctggggattatttaccggggcatcagcaagggcatcgaaatgttttcgcgctggttcatgccgttgttgcttctgatttccctggtgctgttggtgcgcattttgtgcatcggcacgccggatccttcttatccggaccgcagcatcgaacaggggctggggtatatgtggaatcccggcaaggtgctggtggaggagctggaccggaacagcggggactggaagacggtttccatggtctcggcctcccaggcgggagccatggatgaagccgtgcggcaggtggaaatgtccggaggaacccggaggctgactgaggtgaccctgtgggacggtctgaaaaacattgagctttggattgcggctgccggacaggtttttctgagcctttccgtaggaacggggctgattctgacgtatgccagctatgtaaaaaagaaggaggatatcgcgctgagcggcttttcggccgccgcctccaatgaagtgtgcgaggtgggcattgccggcatgatgacggttcccgccgccgtggcgttcctgggagtggccggagccgccgggcaggggaccttcgcgctgggcttcatggtgctcccgcaggcttttgccaaaatggggtccagcgtggtattcggcagcctgtttttcctgcttctgacggtggcggcggtgaccagctctatttccatgatgcaggtgggcctgtcctttattgaggaattcatggggctgaaacgtaaaatggctgtggtggtgcagggcttttttacggctacgggaacgttcatcgttgcctggtacagcggcaatctgctggcgatggatacttatgatttctttctgggcacgctgtgcttctttgtgagcgccatggtgatgatgattctgttttcctggaaactgggggtggaccgggggttgaaggatctggaggacggttccgtcatccgcattcctagaatttaccgtttcatcatgaagtttgtgacgcctacgctgctgctggcgattttcttggcctggctggcgcagaatatctgggtgaagcaggccgcgcccattgaagcgctgggacgtggggaacatggagcggtcattcccatggggtttctggcggcttatgccctgttcctgattttcatcaccatggcttccggaaggcataaggtgtaccacggtccgcgataggcggggaaggcctgctgcgcggatgcccgttccccgcagtttgcggcaggccgggaggcaatccggaggcttgaccggagccggatttgatataggctggcgtcatgcccagaataaggaggatacgcaggaaaaagccccgtgcaggcagcgtctggaaaaagctgctgctgtggggcgtgctggggatgcttgttctggcggcggctgtggtggcgggatcctatctgtacgtcagggcctatttgaagagcgatggttttttagccatgctggaacagtccgccgttgatgatatgaatgtggagaccgccaggatagaccctcttgactgggacggttccggcatccggtgcggcggcgtaacgatggaggggcatgagtttttgacttcccttcaggccaggaacattgagacggaattcagccgctgggagttgctgaagcgcgcgtttgtcattacctccgtcaatattgcggagctgaagcttcggctcgctcccgtgcctttccgtttccgggaaaagccggaaggggccaggagctgggcggaagagaatattctgccggatacgttccgtctggaaaaggggagcattgattccctgtccgtttcctatggggaggccggccggccgtatgttttggacggaacccgcgtggagagcgcctatgacgccggttccagccagtacaggtttgaaatgcagggggggaggctgctccttcctttcaagggatgcccggagttttccctgatgtctggcacggcgcagtttaaccatgccagcaggagggtgaacgttccgtcctgccgcctgactacggctgccggcggttatctggacatcaagggggactgggacggctcttcctcctcctggacggcgaatatggtggtgaacggcgtccccgcctcttccgtcctggaaggccattggaaaaagcatgtccagggcagcgtaagcggcgggatagacctgcgcggcggacgggacggcgtaacccatgtggccgggctcgccaggttgcagggcggcatgctgaccggccttcccgttctggacaggctggccctgttctgcggttcttccagattccggaatcttcccctgcacgaggcgtccgcccagttctcctatcaggaatccgcctggcatatttccaatattctggtggaaagcgaaaacctggtgagggtggaaggctggctggaaatcgggaaagggggggcgctgaccggaaggctgcaggtggggttgcgggccgacggcctgtggaaagctcttccggggttttccgatgtgttttccgtttcccgccagggagcgggaggcaatctggcgtgggccaatgtgaatatcggcgggacgctggacaacccgtcggaggacttgtccgcgcggctcatcaaggcggcgggaaaccgcctgacggaaataggaatgggcaaggcggctgaggtggcggatgtcgcggcgcggctgctgaacagagggaccggggaaaacggagcgggggatggtgcggaacgtaatggccgcaagttcaggattcccgccgcggacgaagtacccgtcccggttgtgccgcggcttcaggacgctgcggaaaaggggcttaaaaccgggaatggcctgatgaacgaactaatgaattggtaacccgtttttttcagatgaaaccttatccctgccagatggtgcaggcggtcgccgttattgtggagcgtatcgcggatacggctttccgcgccacccttccgaatggcaaaaccgccgtggcttttgtagaaaaaaagaacgcttccctgagggatctgctcaaaccgggcgaccgggtgaaggtgacgatttgcccggcggattttgaccgcgcccgggtggacggactggcggaatgaggcggacgttttttccttcattatggggggaaagaggcgttttgcccggtgcaggaaaaccgctgtaaagacggaaccgtccccatgccgggattccggacggtgaagaacgggggcatgggcgggaatttccccgtgccgggatggatgcgggaagggctttcctttacagccgggtgcgtccttccagagccttcatcagcgtcagcgtgtccgcgtggctgaggccggagccggcaggcagcccctgggcagggcgggatatcctgcaatccatttctttgagcagatggtggaggtaggtggccgttgcctccccttccacgtcagagcctgttgccagaatgacttcgcaatcaggctgccgggagacgcgttccaccagggattgaatgttgaggtcttccggctccacatcatccagaggggaaagcttgccgcccaggcagtggtacaatccgcggtaggcgctgctgcgttcaatggggatgacgtccgtggcctgttccaccacgcagatgaggcggctgtcccgttcttcatcccggcaggcggcgcagggctccccttccgtgctgaagaagccgcagacggggcagggcgtaacgtgttccgccgcctggccgatggtgcgggcaatcgcctccgcttctcccatgtgcccctggagcatccacagggccatgcgttccgcgccgcgggtgccgatgcccggaagctgtttcagggcggttaccagttcaagcacggggatgggatagtccagattattcatgagcggaaggaggttcggaatgacgccggacagggggcgtttggggccagaggatggcgagcgcgcccgcgctccctgcggaaagcaggcatgggacggcattgaagaaaaggccccacagccccagcaccggggtaaagctggccagaagaaggaggaaagcggccagaacggccgttttgcggagcgtgccgcggatgagcagcaaatcgtaaacgagggccaacgtcaacgccatgcacagcaggaatcccgtgccgggagaaagggcgggggcgtccgggggaagcagaaacggggcggaggccatggcttccttcagctcccggccccagacgggagtaaggcccaggtaatagagcgccacgagcaggataagcccggctacggagaacagggcccagcgcatgagcagaatgtcctgatgcgttttggcgggcatggcttttaaatgaaaaaagcggaagcgcgatggctgcggtggccgcaaacatcagcgcttccgccggaaaggagaggcctgaaagggtcaggcgaatcgtttcacgatgacggaggagttatgccccccgaagccgaaggaattgctcaagacggcgtccaccctggtttcacgggccttattgggcacgcagtccaggtcgcattccggatcctggttgtccacgttgatggtgggcgggatgatgttgtcctgcatggccatcaggcaggcggccagttccacgcctcccgcggcgcccaggaggtggccggtcatggatttggtggagctgataagcagcccgtttttagcgtggtcgccgaaaacggccttgatggccttgatttcgcagatgtcgcccagcggggtggaggtgccgtgcgtgttgacgtagtcaatgtcttccggcttcattcccgcgtgttccagagccatcttcatgcagcgggcggcgccgcggccttccgggtccggggcggtgaggtggtaggcgtccgcggagatgccgtagccgacgagttccccgtaaatttttgcgccgcgcttctgggcgtgttccagcgtttccagaatgacaacgccggcgccttcgcccatgacgaagccgtcgcggtccacgtcgtacgggcgggaggcccgctggggctcgtcattgcgggagctgagggctttcatgttgctgaacccggccacgcccgtgggcaggatggtagcttccgctccgccgcagaccatgacgtcggcatccccgaatttcatgatgcgccaggcttccccgatgttgtggttggaggtggcgcaggccgtgacgatggacatgttcggaccgccgaggccgtattccatggagatgaggccggaggcaatgttactgatcatgtacgggatcatgaagggggacacgcgggcaggccccttggaaagaagcgtggcatgctgactttccagcgtgccgaggccgccgatgccgctgcccaccatgacgccgatgcgggttttgtcctccgcttccagatccagcccggaatccttgagagccattccggcagcgcccatggcaaagtgcgtgaagcggtccacgcggcgggcgtccttgggcgtcttgaagtacggggcgggatcgaaatccttgacttcaccggcgattttcgtggagtagccggtaacatccatggatttgatggtgtcaatgccgctgcggccagccttcatggcttcccaggtggatgcgagatcattgcccagggggctgatcactccgatgccggtgataacaattctgcggtcggtcataataagtgtgagtggttgcaaataatgcttgaaccagaataggcgacattgcgggaaagtcaagctaatcccccctgtttcccggcacgggggaaacaggttgggcggaaaggtgtatcctgcttacggcaaggattttgcgggtcaaggatattccctgttgcctgctgaggctccggggccgtgaacggatttcagggtaaattccgccgcggcggccgcatccggcagcgcatggaagggcggccggatattttttcctgccgcacgcctttaacggggggcatccgccgctatcggaagaggggctgcccggaatcccagggaaagggaattgacgcagtagcgcagattcttcggagtcaggcgttctccattgaaaatgtgtcccagatggcctccgcagcgggcgcaggtgatttccgtgcgccgcccgccgcccgcatggacgcttgtgacggcgtccggcagggaatcatcaaaacagggccagccgcatccggcatcgaatttgtcttccgaccggaacagaggcgcaccgcatttgcggcaggaatagatgcccggctcaaagaagctgacgaattccccggaaaagggcggttccgttccctggtgttcgataatgcgtttttccgtttccgtgagggggcggcgcgtgcgggcagggccgggatcgggtacgtcccgggaggcgggaatccctccattcacggccatgactccagccacgccttccgcaatcatgcctatccatgacgcccagtgtctccgttcttcctgattcatatggcttatgaccaggttggagcgggttttgctcattcctgaaacgatatcttgtgggtattgccgtttttaaggggagagtcctgaaaatatggcagtctatggaagagttaatactccagctccagccagagctgttcccagatgccctgccgctgttcttcctggggatgggagacggacagccccagaaggcggaatgtacggtccccggaatccagttcttccatcagggtgcgggccagggggagaattccttctttctccgtcaggatttccggaacggtcgcgcagcgggtcttctggacaaagtccgggaacttaaccttcagggtaagggtgtttccccggaagccggaacgggccagccgccccgcgagttcttccgccagcagggggaggcgttgttccagcgcttccgccctggtgacgttttcccggtaggtttcttcacaacccacggatttgcgcatgcgggaaggttccacagggcggtcgtccacaccgcgggcgaagttgtagaagatggctcctgttttgccgaaatgccttaccaggaagtctttgtcccgtgcccggagctgcgccccgttggtgatggaaagggcgcgcatgcgttcggcggtggcgtgcccgactccccagaaagcttcaatgggaagtgccgcgatgaatttttccgcccgggatggatggatcgtgaacagcccgtccggcttgcggtaatcggaagcgattttcgccaggaatttattgtaggaaacgccggcggaggccgtcaggtgaagttcccggcggatttccttcttaatcctcctcgcaatgtcgacggccagcggaatgcccggcttgttttccgtgacgtccagaaaggcttcatccagggaaaggggttccaccagatctgtgtaacggtggaaaatggcgtgtatctgcgcggagacggccttgtacacatccatgcggttgcgggtgaaaatcagatgggggcaaagcttgagagccttcatggaaggcatggcggaacgcactccgaaacggcgcgcctcgtaactggccgccgccaccacgccgcgcatttccggcctgcctacggcgatgggcttgccgcggtattcgggatggtcccgctgttctatggatgcgtaaaaggcatccatatccacatggatgatttttctctggttcatgggggcgcttcatgattcctgatggggcgggaaacatgagggaatgggatgccccatcataatccggcttatcctgcaagtccagttggaaggagaagttccggcggggaggtgaaagaaaggcggatttttggggaacgggacgatttaagtgaaaaaatcttccgggcatggtaaattccgggcatgtccagcggaatgaagaaacgcctgtgccggaacctggaaaaggtgctgcatgcggaaccccgcgaattgcctgccgcagcggggggaatcctcctgtttttcctgttgttcctggcctattccatgttgaggccggtccgggagacgatgggcattgccggaggcgttcagaatctgcagtggctttttacggctactttcgccgcttccatagggggccagtttttattcggatgggtttcctcaaaggtgcggagaaaagccattcttccgtggacgtacggttttttcattcttaacctggcggttttcgcggcgctcgtgctggcatgcccgggaaatgtctggacggcccgttcgttttatgtgtggctgtccgtatttaacctgcttaccgtttccgtggcgtggagcgtgctgtcggacgtcatgaagccggggcagatgaaacgcctgtttgccctggttgccagcggaagcagccttggggccatggcggggctggcggtgacggccgcccttgccggagtggttgactatctgtggctgttccttgccgccgctgtttttctggcgctggcgatgctggcgggaatgtacctgcaccgctggcgtgacgggaattccccggaagatgaggaaacgggagttcttcttccggccgattgccgggaacgccctctgggagggaacccgtttgccggggcgtccgccgtattccggtctcccttcctgatgggcatcgggctgttcatcatcctgctggccgggaccaatacgttcctgtattttgagctgatgagcgttgtagcgtcttcctttcctgatccggtgcgccagacgcaagtattcggagcgctggacgttgttgtccaggggtgtaccatgctgcttcaggtatttctggcgggacgcattgttcggaaattcggattggcggcgttgctggcggctgtccccgttcttatttccctgggttttgtatggatggctttcgctccggtatttgccgtcgtggccgtggtgatggcggtacgccgcatcggggaatacggaatggtgcgtcccggccgtgaaatgctgaattccgtattgtccccggaagaaaaatataaagccaagagttttattgatacggtcctttaccgtggcggcgacgccgtcagcgcatggctgaaaagctcctttaacgtgttgggggcccattccccgtgggccatgctggccggagccgccatttcctttctttgggcggccaccggattcctgcttgcgggcaggttccggaaaatggccggagtacagggaaagaaatgatccttatgtcggggaattttccgttttgtccggatacggcctgccagatgcggcaatttcttgtgatgcctcttttccggcggctgccgccgtcagaggtgaactgctggggtgttggggaatctggcgcgttttggaaaagcgtggccaagccgtgttctgtggaggcataagtgccaggccttccgttgagggatagttgcaggcaggggattgcgtgatgtccttgatggcggaagcggcgggaggcaagacagatgtttttctccggcgatgaataatttctggaatgttctttatttgacggcggtttccctctgcggcggcaacatgcggattttcaacccggaatcaatactaaatattgtggaaaaataatttaagtatcattgcaaccctgttttcaggatgatttttcctccaaaaaaactccctgccgtggcgggcatttcctgttgtttttttggaaacaattttgacaccaatatcacattttaacaaaatgtaatatttttaatataaaaaagttactttaaaaataaagattaatttccccatgccgcaagacatctgccacatgcaaccctccatccactccggcacatgaaacggattgaaaatccgttattgaagcccaagcctctgtgaggcaagtatgctggtcatctttccgttagatgattccgtcattactattgttatatattcctctgataatgaagaagacactcattacgctcattgctctggcgggaatggctcatgccgattttgtatggaacggcggtgagagcattacccaggagctttggcagacagaatccagctggtccatcaccggttcagattcctggccgtcggcaggaaccggtcccggcacgcccaattccaacgcatggtctcttatttccgtttccggtgcgagcggcagcatttcccagctggaaggctggacattgaagcttgccctgcaaaacggtgcggatttgactgtagggaacgtaaaaaaattccagggcggctgttctattgatattgatcaatcatctacgctgaccttcaacagttataacggcggcaacgatggtgggcgcacgacgttgaacaactacggcacgtttaacctggcttataccaagaaccagggcggggaaggattttacgtcaatttgggagccacgggcatcatgaaccttacttcctccaacggtagttcatacaatgccaagatagcaagtctgaccgctaagctgactcttgacggaggcaccgccagcggagtaactgccagcggtcatcaaatcctgaccaggaacctggttaccctgggaagcaatatgtcttttgacggcacggacacttccctggaaatgctcagcggcattgcaggcattgattccctcaccgctgtggacgatttgactaatgccgaagttggttcttatatgattaccaaggatggaaacggatacagcgtttcctatgtggttccggaacccgcagcggcttccctgagcctgctgggcctggctggcctggcgatgcgccgccgccgcaagtaacggcaaacttggattcctgtttccattcagctcccttccgcggttaacggaagggagtttttttattatttcccggaaaggcggcgtatttccggaagatgtccgggcggaacgggagagagaagccgggagagtgtatgcatgggcctattcttccccggaggatgccgtaaccggattagccccggctattgttctgcaacgctgcaagaaaggaaaaaggcctgttattgccgggagtaaccactttctttcaaaaaaaagtggtaggcccggtaggaatcgaacctacatcgtcggtaccggaaaccgatgtcctatccattgaacgacgagcccatgttcccaaggaacgagagaaatagaatagaaaaaacgggccggatgcaagtatttttatgccggtgacgggattggcatgatgaaaatgtgaaacggggaagttaagggcagggaggtttccggatattccggggagaaggaaggggggatcaggagattttatgatgaaaagagaagatggctgccaggacggccgccacggtaacggccatgatggccgcgaaaagcggccagagatccaggaatccggctccttccagaaagatgcgctggatgagttccaggccgtatctcatggggttgagcagcgtgaggtcctggaagatttccggcatgctggagatgggcgtggcaaagccggagagcatgaccatgggcaccagcagcaggaaagttcccacaatagcctgctgaagggattgggcgaaggaggaaatgcacagcccgatggccgccgccgtgacgatgaagagcagcagggcggcggaaagcagccagatggagccctggaaggggatgcggaaccagaacatggctaccagcactacgaagacggcctgcatgattccggtgacgacggaggctgttcccttgccgagcaggatttcccccggggtgtatggggcgacgagaagctggtcgaaggtgccttcctcccgctcgcgggcgatggagagcgagccggagaggatggagttgatgagcacgagtacggcgatgaggccgggaacgatgaaccagcgtgtgatgaggttggggttgaaccaggcgcgggattccgtttccaccggggaggagccgccgtttttggagagcagttccgccccgtaggcggcagcgatttgctggccgtagctgagggcgatggccgccgtattcgtgttgcgcccgtccgcaatgagctggagggatgcgggcctccccgtctgaatgctgcgggagaaatccggcggaatggtgagccccacgacgatttcccggttgtctatcatgcggtcaatgtctttttccgtggccgcggcggcctggcgccggaagattcccgtgccttccaggtccgcgatgtattgggcggccgcttctccgccgtctttgtccagcacggcgtatggcacgcgggtgacgttcatggtggcggcatagccgaagatggctatctggatgatgggagggatgatgagggccagccggctttttttgtccctgagcacggccagcagttcttttctgacgagggaggctattctgatcaggaagtccatggcgctattcgagggatttgggtgctttcatcctggcgattcccatgagcaccacggcaaagacgcccagcgtgatgcagcagggaatgatgacggaagggatgtccccggccaggaagagggtctggagcagggtgacgtagtagcgggccgggatgaggtaggtgatggcccggacggcgggtggcatgttcaggatgtcatacaggaagccggacagcatgagggccggcatgaaggtgcccataatggcgaattggcaggccaggaactggtttttggtggcggtggagatgaccagccccaaccccagggccacaatcaggaacagggcggaaaccgccagcagcagagtgagggagccgcggatggggatgccgaagacgaaggcggcgaagagcatggagatagccaggctgaccatgcccagcaggaagttggtggcggccttggccgccaggatttctccgctgcccacgggcgtgacgaagaggctttccagcgtgccgcgttcatattcccgcgccatgaccagggaggtgaggagcgccccgatcatggtcatgatggtgacgatgacgccgggaaccaggtagtagtggctgtcgttggcttcattgaagcgggtgcgcgtctgcacgtccagcacgggggctgtccgcccgcccagggaagacgcccaggagccgacgacggcctgaaggtagttgcggatgagggtggcctggttggcgttgactccgttgacgacaatctggactttcgtggttccattgtggagcgtgtccggcgcgttgctttgcagggcgatgaaggcgtccgcttcatgggtgcgcagtttttcttcagcctcccgggtagagaagacgcgcgtggtctggaaatatctggaaagggtaagccttgtttccaggtccgtggattggctggaggcggggacggccaggtacgcgatgcgcacgtttttgatgtccatgctcatgccgtagccgaagaggagcaggagcacggccggaaggatgaccgcaatgcccacattgccggggtcccggaccacctggtggagttccttgacgatgagggctcctattcttttgagggaggcggtcatgtttctcctccttttttcatgtgttcttccgtgatggccaggaaggcgtcttccagagaagcgggggctccgtcttcacgcgggggagcgtgtttgcggatatcgtccggggaaccttccgccagcgtggttccatccatcatgatgagcatgttatcgcaaaattccgcttctcccaggaagtgcgtcgtgatgatgatggtgacgcctttttccgccagggcgttgatgcgcagccagaagtcgcgccgggccagggggtccgctccggaagtgggttcgtccagaaaaaggatgtccggggagtggagcagggcgcacgccatgctgaggcgttgcttgtagccgccgggcaggtgcgcggcgggggcgttcatgtacggagtcaggtggaattcttcttccatggagcggatggcttcctgccgctcctttccggacatgccgtaggccccggcgaagaatcccaggttttgacgcgtggtcagcatgccgtacatggaaaatttctgggccacgtatccaactttcctgcgcgctctggcggcggcggtccgcagatccgccccggccacattgagcgtgccgccgctggcgggcagcagcccgcagagcatgcggaaagtggtgcttttccccgctccgttggggcccagaaggccgaagacctgccctttgcggacggagaagctgacgtggttgacggcaatgaaactgccgaatttcctgacgaggtccgttacccggatgacggtgccgccgttttccgtccgctccggttccggcgttccggcaggggcggggatgtcctgcggggcgaggtccacttggtcggcaagcagggtcatgaagccgtcagagaagtccggctgcgcgggggcggggtggtattcctccagctttttccgtgcggggtggccgtggggaacgatgatgcggacggtgttcccctgcggggtggcgttgatgatgccgggcacggcggccagcctgctctggaattggcgcgcatgcagcccctccggcgtgcgcaccgtcacgcacatgccttccgcccgggcgacgacgtcggcgggaggggcgtccataagcaggcgcccttcgtacatgatgagggttctgttgcagtaggccgattcgtccatgtaggaggtgctgaccagcacccccacgccttcctctccggagaattgtttcaggatgctccacagttcccgccgggagagcgggtccacgcccacggtgggttcatccagcaggatgaggggcggggaggagaccagggaacagcacaggcccagcttctgcttcatgccgccggagagctttcccgcaagccgcgtggtgaagcgttccaggctggtcatggcgagcaggctgcggaagcgcttttccctgtcctggccgtaaacgccgtgcatgcgggcgtaaagctccatgttttcccggacggtaaggtcttcataaagcccgaatttctgcggcatgtagcctatggaggcctggatggaccggctttttttcacggagtccagattcaggacggagatagacccgccatgcggtttcatcaatcccgtgatgaggcggatcagggtggtttttcccgctccgtccggccccagcaaccctacgatttccccggcggacaggcggaaggagacgtcgtctaccgccgcaaaggggacgcttgcggagtccggaaatattttccggacgttccggcagtcaatcaggggctgggattccgtggtcatggcctgggctgttccgggggctgtgttccggcgttctggtccagggggatggtgacggtggcgggggctcccaggcgcagccggttgtccggatcgtccacaatgatgcgcacttcatagaccagtgccgttctgagatccggcgtttccacgtttttaggggtgaattccgctacggaggagataaaccccaccgtccctttgaagccggtgtccgggaagctgtcattgcgcacggtggcggaaaagccgggctttactttgccgagctgggattccgtgaggtaggcccgcacccatttggtatggttcagggagatgttgtaaacgggtttctgcggggaggccatgtcccccttttccagaatgcggttgcgcaccacgccgttgccgggggcatagagcacggcgtctttcaggttctgctccctgatggtcaggctggctttggcctggttgtactgggccagcgcctgggctacgtcttcctcacgggaaccggccagcagcagttccagctgttttctggctacgtccagattggcggcggccacttgccgggaggcgacggcgtcgtccgcctcctggcgggagatggattttgtttcagccagcgcctccagccttttgctgcgcattccggcgttgttcagcgtagcttccgcggcctgaacgtttgccctcgcctgggctatttcttccgcgcgcgggccgtttttaacgcgcaggtagttttggcgggcggcttccgctatctgccgggcttcgtccgcggcctgccggagccgcaccgtttccagcgtggcgagcttctggccgggaacaaccgtgtccccttcgtccaccagcacggagtcaatacgttcggagatgaggaaagccagatccacctggcgcaggtccacattgccgtaaagaacggctttgtcctcgggcccggacggagttttccggtagatgagccaggcggccgttcctgccgccgcaaggagaaccaggaggataaccagctttttcatagttttatttatacgtgtgtataatttattgcaagtaaaaatggagcccgcatgacggagaaggaattagcgatttactaacggagggagaacaggcataatccggcgtcttttacttttcccattatctgttatgatgaccgccaccgagatacgccaaagctttctggactttttccgcgaaaaacagcacacggtcgtgccttccgcttctttgatgccccagagccccggtttgttgtttacaaatgccggcatgaatcagtttgtcccgtatttcctgggcgtatggactcccccgtggacgcccgcccgcgctacggatacccagaagtgcatccgcgcaggcggcaagcacaatgacctggaggatgtggggtatgactcctaccaccacacgttttttgaaatgctggggaactggtccttcggggattatttcaagaaggaagctatccgctgggcctgggagctggtcgtggagcggtggggatttccggcggaacgcctgtacgccaccgtgtacgcgccggacaagagcaagggcgaccccggagagtttgaccgggaagcctgggatttctgggctgagctgttccgttcccgagggctggacccggacgtgcatatcgtgcacgggaatgtgaaggataatttctggatgatgggggaaaccggcccctgcggcccctgttccgagctgcacgtggacctgaccccggaggggaatacgaagggaagcctggtaaacaaggattccgaccagtgcatagagatatggaacctggtgtttatccagtacaatgcggagagcgacggctccatgcgcaatcttccggcatgtcatgtggataccgggatggggtttgagcgcgcgtgctccatcatgcagtgcacgaacggattcaaggatttttcccgcaaaccgtccaattacgccacggatgtattccgccccctgtttgaccgcctggaagttttgagcggacggaagtacgcggacgtgtatccggcgcccggttccaaaagggtggatgcggaggacgggacccttcaggaggcgattgccttccgcgtgattgccgatcatctgcgcacgctcagtttttccattgcggacggcattctgccgggcaacaatggccgtaattacgtgctgcgccgcattctgcgccgtgccgtgcgctatgggcgccgcctgggttttacccagccgtttttggcggaactggtggatacgctggtggagtccttcggacaggtgttcccggaactggccgcccgcgccgctaccgtgaaggaggttttgaaccgtgaagaggccagttttaatgagacgctggaccgcggcctggaattgtttgacgcggaaacggcttccgccggaaaggtgagcggcgagttcgccttcaagctgtatgatacgtacgggttccccattgacctgaccgccctgctggcggaggaacgcggcctggatattgatatggagcggttcaacaggctgatggaggaacagcgggaacgcgcccgggccgcccgcaagagcgaggtggtgcgcgccctggatttgaagacggacgccgtgacggagtttacggggtacgatgtggacgaatgcgccgctacggtgctggaagtgagccgccagggggattccctgttcatcatcacggacaagactccgttttacgcggaaatgggcgggcaggtgtccgatgccgggttgattgaaatcggcggggaaagctaccatgtgatggccgtccagcagatagggaatgcccgagcccatgtggtggaggcccgtcccgggctggaggtgaagcccggcgaccgcgtgcacttgagcattgacgcggaacgccgccgccgcattgaggcgcatcacaccgccacgcatcttcttcactgcgccctgcatcaggtggtcagcccggatgcggcccagcaggggtcctttgtttcggaagaccggctgcgctttgactttaacagcagcgccgtttctccggaccagcttcgcctgattgaagagaaagtgaacggctggattgaggagtctcttcccgtgcactgcacggaacgcgcctatgcggacgtgaagggcaatgccgcgattgcccagttcttcggcgacaagtacggggatgtggtgcgcgtggtccaggtgggcggatgcagggatgggctggacggggtttccatggaattctgcggcggaactcatatttccaatacgaagaatatcggcctgttcaagattaagagcgagggtgccatcgcttccggcgtgcgccgcattgaggcgatgacgggggacgctgctctggaaatgatacggcagcatgttgttgccaagagcctggaaatcgccaaggcggtggagaagatcaaggaagtcaattacgagttggcggacatggggctggaacagatgcctgtccccacgattgaaggcaagccggggctgacggccctgggggcttccgatatccggacggtaaatgattccctggcgcgtttcgacgcctccgtggagcatttcaaacagacggctctggatgcggagaagaagcttaaaaaagcccgcgccgggcagtccgccgccaaggcagacgccctgctgaatgagtggctttccgatgccccctcttccctgatccaggtggcggagggcgccggggaattgcttcaggagctgctgaacgggttgaaaaagcgccagtatgcgggcgccgccttcctgctgtgcgtggacagttcttccttgctcctgggcgcttattgtggcaaagatgccattgcggacgggttgtccgccggagatatgatccgcgaggttgccgctcttgccggaggcaagggaggcggccgtgcggaccaggcccgcggttccgctccgcaggatgccgatcctcaggccctggctgccgccgcccgcaatattattaacggataaaccctttacctgggccctatcggacaccaatcatggacaagaagattttcccggacgaacctgagattcccattttgcctaatttgtttacggcagggaacctggtgtgcggttttttcgccattctgacgatttttgagggaatcaaccaggcggacagcgacgctgtggctgctttttcctattatcagaatgccacttttttaatcttcgcggcatgtttgtttgacttgtttgacggccgtattgcccgcatgcgcgggcaggacggccctttcgggcgggaattcgattctctggcggatattgtctccttcggcatcgccccggcgttgctggtggccaaggccgtcctgttccagctgtcccctccggaggtgggttggggcatcggcatcctgtacctgctgtgcgccgcgctgcgcctggcgcggtttaattgcatggcggccgctccccggaaggaaggccagagcagcgattttgtgggtctgcccgttccgatggcggcgggagccgtggtctccaccatgtacctggtgatgtatctggcgggcagggctccggacggggccatggacctgggcgtcttcaaatacgtgattgcgctggcaatggcgggagtctccattctgatgatgagccgggtgatctatcccagcttcaagcatatcaacatgcgcacgcgggggacgatgtacgcgattgtgttcatcgtgctggcggtcatctgcattttcaaattcccgtgggtgatgcccgcagtcattttttccatttatctgctttacgggctggtgcggccctgggtggcccgccgctggcggaacaggctggaagcccgcgatggagaataggaagactttcagaaaactgttcctgcctcttttttgaacagaccatgctgcgccggattgatgccgggcggcggtgtttccgcggcccggttccgggaatgtccctgggtccggcttttttaagggcgggaacgcagccctccctttcaggaccgtccgcaattttcctgcgcggagcgtgcgccggaccggccgggggataaagattcggcgtccggaggaaagacggagaaggagggaaggagaggaatcgtcccgaaggaccggagcttatttgtttttctttttaaaatcgtccgcaaaggggtctttttccggggcggtgggcacggcgtgcgtttcaatgtccttggtgctcttgaccagcgtgatgcatacgggcttgctgcggttgcccatggcgtcataagtgtaaaggaagcggcgcacgagttccttggtgcgggaatcgaacatttgctcttctctcaggttggcgttgccgtcgtagccgtaacgcacgaaaaagagttcgtttttctgcccgtcaaagatcaggcaggagcgcagctctccaaaaggccctcttttgtacagggttacggaaacgaggacattgcggatgttgtaagtggtttttttcatcccttttccgtcccctgttttttcaaagtagctgcgggaaccgtcttcatgtttgaccatgcgggaagaagcggtctgaacattgaaatcgtcctggtcggcggccagggctccggacgtcatgagcagggggatgaagagaagcaggggcgttgttttcatggtgaaaaaagagtttctgacttattaaagtgatgtatagtggctttgacaagaacgtaattagatgaactggcttgtaaggagagacgtattggatgtggcgcgcggaggcgtgctgatgggaattgtgaacgttactccggattccttttccgacggagggcgtttttatgcgacggaacgcgctgtctcccatgcaaaagagcttgaacggcagggagcccttattctggacattgggggggagtccaccaggccgggggccgcggaggtttccgcggaggaggagttggacagggtgctgcctgtggtgcgggaactccgttcatgcacggatgccgtgatttccgtggacacgcgccatgccgccgtagcggcggctgtgctggaagcgggtgcggacgttattaatgatatttccggattgcgggaggcggggatggcggaattgtgcgctgcggcgcgctgcggcgtggtggcgatgcacatgcagggacggcctgaaaccatgcaggacgctccttcttatggggatgtggtgcgggaagtgcgcggctattttgaggaacgttatgattttctgctggggcgggggctggaaccggagcagatctgctgggatcccggcatcggctttggcaaaacggcggaacacaatctggccctgctgtccaacatggacaagcttcaggtggcaggccgcccggtgctgctgggcctttcccgcaagcgcatgctgggcgccgtcctgggggatgcggagcagggacgcgcgccgctgagcaccgccgtgatgacggtgtgggggcatttgcacggcgcgcagattcaccgtgtccatgacgtggcggaatgcgcccgcgccctccggctgatccgggccgctgaaccgtttgtccgctgattgagccatggaatccgcttcttcccgtccggtattgacgtccctggcgtccattgcattttccctggcggtggtgttcctttttctggcggtacgggggatctggcctttcggaggccgcttcctggagtatatggataacgggcagctggtttatcctaccttgaagtattatgcctccgccctgatgtccggagcgtttgacggagcttttttttatgatgtcaatggcggcgcgggaatccgggtgagccctacgctgccgcatcagctgctgatcccctccacctggattgccgtggcgatgggggattccttcctgttgaaggacatggtctgggtgatgctggcggatgtggcctgcatctgcgtgacggcttcctggttcctgagacgcgtgtttccctccctgcccgtatgctggaccgtgctgctgacggcgggttatgccgtggggggctttttccagaccaagtacgggttcatgcagttcctggaccatgccgccatgttccccctgtttgccctgggcctttaccggctggtgaacgggggaaggggctggctgtatgccgccggcctcttcctgctggctacctccctgtacagcgctttcatggccgtcgtcaccggctggctgttcgcgtgggcctttacgctgcccctgaaggggacgcgggaacgccgcgtgcgcctggcccgcgtgttctggtacacggcggcggtaacgctggccacttgttattactggctgccgatggcggaaatgagccgggattccatgcgttccctgtttatgacgccgcccacgttttttgaattgtcatggccgtttgaccctcccaaattcctggaacgcctttacgcctgtttgccggggatgtcatttgccgctctggcggcggtttatctggcttgcgggaagaaggcgtcccctgcgccggacagagggaggcgcctgtttatccttcttctggcggcgtccgttttgcccgcgtttgtcgagcccatccaccgcgccgcccatttatggagctacgtggattttcccgtccggttcggttttattcccaatctggcggtaatgtcgttctgcgcctggattttgtccgacggcagacttccggggctggcaggacggccatgggggtggggatggagcctggggcttcccatagcggcttttttcttttccctgtttgtcctgaagatgacggctgcggatcttgcggtgcgtcttctgcctttgctgttttttgcatgcgcatgtttgtgctggaggcatgtggagggcaaaaggctggcgtggtccatcgcttccgtgatgatgctggggctgcccataggggctgccgcgttctggaagcagggggaggaggagaaagcctccgtccaggcgctcaatgcggaatggctggcgcgcggcatgaaggggtattcaggcttgctgcgcgtgaaggacagggatcgcctgatggtggaaaacgcggattgcctggggcctgtcccgggcattggcaatttccggcatacgacgagcatcgggcatttccgttttctgaaaaacctgggataccgggatgaattcacgcgcacgtacggccagggaggcactttgttttccgatttgctgctgggccacggttttgtgctggcgtcccgacccatggagggaatggagtgcgtgctttcccgggaaggcatgtatttatacaggcttccgggcgcccgctgggggctggtggttccccagggcgcgctggggctgcgtctggatgggaacgctgatgtgttcagcaatcttaatgccctgcacgccgcgctctgcccatcggcggaaggccccctttatgaggccgtaatagtgaggacggagatgagcggccccttttaccgggcgggcattccggaatatcccggcgcggtatacgggttcccgcagacggatacggcggaactccgtgtcaatggatgtgcggtgcccgtcatggcggaggcgcagaagacatccggaggaacgagccgcacctataacggggttttggaattgaagcgtgcggccgttgccggggaaaccgtggtggaggggaggatgctgcggaccgtggagacgccccttctggcggctgcggcgcgtacgccggagcaggatgttccggttctggggaaagagcaggataagtacgggatggaggcgaaaggaagcggtggccatgtggaggtggcgctgaatgccggggaaggggaggctctcatggtgccggtcgtgtatgaccggggatggagagcccggcggaacgggatggaggcgcctgtggaaaaggtgggggaattgatggcggtgcgccttctgaaagggcaaaaccgggtggtgtttgattattatccgcctttattgaaagggtccctgctgttttcctccggagcggccgccgtcttcctgctgtatgcatggtgggcgcggcggcatccggaatccacgctcaggaggattgttctggcctccggatacaggctgtttcagtgctgtgccgccgtggtgctggcggctgtttatatggggtcaatcgtgttgtttatcgtgcagtccgtgctgtgacggaatacccggaaggcggggaaagaggccagggactgcgtgcggggggatgctggcgtggaacaatatccggggggcggtaccgctcccgtttttccggttaccggattggcgggaaaaggctttccgttttgaaggatggttgacaggggaatctggcgcggtagagtggtttcatgcagtcttcctattgtccgagtccttatcgatatacgcgccgcgtaacccgtgaagtcatggtggggaatgtgggggtgggcggttccaatcccatccggatccagtccatgctgacgtccgatacgcgggatacggatgcctgcgtgaaggaggctttggagctggcggaggcagggtgcgagattatccgcctgaccgcccagaccaaggcgtatgccgccaatttggagaatattgcccgggaattgtgcgctgccggctgccatgtgcctctggtggccgatatccacttcaagccggatgccgcgatggaggctgccaaatgggtggagaagattcgtattaatccgggcaatttcgttgataagaagaagtttgaagtgcgggagtattccgacgccgaataccgcgaggagctggaccgcctgagggaagaatttacgcccctggttctgttttgccgggagcatggccgcgcgatgcgcatcggttccaaccatggctccctgtccgaccgcattctgaaccgctttggcgatacgccggaggggatggtggagagcgcgattgagtttgcccagattgcccgcgacctggattaccattccctggtgttttccatgaaggcttccaacgtcaaggtgatggtggccgcttaccgattgctggtggagcgcatgaacgccctggggccggattggaattatcccattcatctgggggtgacggaagccgggggcggagaggacggccgcatcaagagcgccgtgggcatcggctccctgctgacggacggcattggggataccctgcgcgtttccctgacggaggacgctgtgagggaggtgcccgtggcttaccgcctgtccaatcctttccagccgtcggagcgttccgatgacccggtttccttccctgaaccggagttgagctatgatcccctgaagttttccaaaaggcagggtgggctggcgatgtattatggcgtacgcctgggctgggaacagcctgtgcgcgtggcggttcctgacgccgggttttacgccctgcagacggaacgggaggcgatgggggacatgatgcctgaattatccctggggcagctggatgccattgaggtggatccccggtgcgatgccgatctggagccgttgaaggagctggcggaaccgtctattgttactgtgaagaacgggctggctatggaacctgtatatgcgttccgccttctggctgcccgtattgaggacaggcacctgatcctgctgaaggatacgctggtgcccggttccgtttccggggaagacgtgccgctgacggctgcccgcaatatcggttccctgctgtgcgacgggattggagacgctgtgctgattcagggcgagtcggacccccgtttggcttctttcctgggattcaatattttgcaggctacgggaacgaggctgacgcgggcggattacgtttcctgcccgtcctgcgggcgtaccctgtacaatatccaggaggcgacggcccgcatccggaaagccacggaacatctgaaaggggtgaagattgccgtgatgggatgtattgtgaatggccccggcgagatggcggatgcggatttcggttatgtgggcggcgcgccgaacaagatcaacctgtatgtgaagcatacgcctgtgaagttcaatattccccaggaggaggctgtggaacggctggtggatctgatcaaggagtatgggcggtgggtggaccccaagtgaggttttaacgttgagggaacttttttgatgcggagagtgttcatcagcggcggtcacggcggtttggcgcgggccatcgtggaatgtttttccgctgcgggatgggagacggatgccccgagccatgccgtactggatgtgggagaccgttccgccgtacgccgctggtttgattgccatgccgcgtatgatttggcggtttgcgccgccggaattaccagggacaggccgttcctgaagcagacggaggaggagtgggacgaggtaatgaatgtgaatgtgacgggagccgcctggtgcggccgatgcgccgccgccgccatggtgcgggagaagagggaggggcaggtggtgatgatcggttcttatgcgtcgctccgtccggctccgtcccaggcggcttatgccgcttccaaggctgctctggcgggcctggtgaaaagcctggcgcgggaatggggaaaggatgggattcgcgtgaatctggtgttgccggggttcatgctgacggagatgacggccgtgctgcgggatagcgtgaaagaggcggctttgtcccggcatgttttgaaccggttgaatacgccggaacaggctgcggcgtttatcctgtttttgcaggatgttcttacggcggcttccggccaggtgttcgatctggacagcaggattgtttaataatggacagcggatttattatccgcgttctcccctgctgatgatatatttccaagaaaatcatttttttaataaaaaagatagcctgctatgattttgaaaacaggaaatcttgaaaaacaaggtttttccggtcttttggaaagtgtgtaaacatggatagattcctctttccgtgtttggaattccatgttttcaacgggaaccggatgtccctggtgtatcaaattttttcttaaattattcttcttcaatattaaggcttgaacgcggataataaatccgtagaaatgtttctccatgagtttgccgctggctgatgatgaagagaaaggaaagcgtttttcctgtggttgtccggaatatatttccccgtcccggaattatggaatagatgccttgcgcattgtcgccatgatgatggttttaattcttcatcttttggcctccattgatgttttgtctttggagaaccatgggtccgcttcctataatgtcgggtggctgctggagattgccgcttattgcggtgtgaattgttatgcgttaattacaggatatgtgtgctgcgacggaacgttcaggtatgaacgtgtggtttccttatggtttcaggttgttttttatacatggggcagtttgctgctggctctgttgtttttcccccaggaggttcagttgagtaatattctgcattccctttttcccgttttatccggccagtattggtatgtgacggcgtatgtggggctgtttttcttcattccgtttcttaacgccctgggaaacaggctgaccaaattacagttccagtatcttctggttaccgttttcgtgctgttttccgttattcccaccctgcttcacacggatgtgttcccggtggaagaagggtatagcatctggtggctgggcatcctttacatgctggggatgtatgttaaaaagcatggcttgctgacgggaatgaaaacgcgtccgttatggatgttttatgccggatgcgtatgttttgcctgggttttcaagatggttcttaatgtggtgtctccatacctgattgggcagatcaagggcggtggaatgtttattcgctataattctccttttattgtagggacggcggttgccctgttgctgattttttcccgaatgcatttttcatcccgaagggctgtctcctgtatttcatggctggcggcagcgtcgttcagcgtttatgtgctgcattgtaatgctttgataggaaaatggtttttgtgggatgtctttgagtgggcagcgtcttcttcctcagccctgatggttgtgaacgtgttggcaatagccgccgtggtttatgccggatgcgccttggtggactccgtgcggcgttatttatttaagctcatgaacgtggaaaggggcgcccgggcggtgacgggcttttgcggaaagctggggcatgcattccggaagatgtgccgccggatagattcgcatccctaaggatgagggaatgtcctgttccggcggttccgggcggtttttgtctggagctgggctagtttttattatcgcttttatccaggagggttttaagccagggaatgaccaggtcttttttgaagaaatggttgcgcgggtccacattggcgaaacggaaaaaggcgtccctgtccagacctgcgggcaattggctgccgtgccagcgttgggcagggtccgcaaaccggggctggtgatggtactggaaatgatccggcgccccggccatacggtaggctgcggagatgagctggaagtccctgtccaggccgccttccgtgcaaatgacagggcgcggagcgagagccgccacgatgtccgggaagtcgaattgtttccagaaacccggaatgaggtggcggatggagttgggagcggaacgcacgcccctgccgttgggcatggtcatggttttggcgcgttccagcgtgcggcacagaaagtcgttatacacgaaggcaaagatatccgggttcaggctgcccagaaccatcatgggttccgttcccagggagaagccgctgaggataatatggtttttttgcgcccaggggcgtgttttcacccaatccagaatacattggtccgcgtaggaggtgtagcccagccagctccagtccatttccagcaggaagcgggccaggttttcataatcgtgtgaagaacggcctgcggcgtgttccgcgtctccttcttcacccgttccggcattgtccaccacaatggccgcccatccctgcctgacataatggaaagccatggcgttgttgcccggctgctgtacggaaggctggtccagatccggtgatgtttcccccgccagctcttccttggtctggtctgacccgggaatgcagaatagcacgggaaccggatttttgtctgaagcgttgttcggcaggagcaccaggaacggtacggcggctcccgggaagggataggcttcccatttttccacccggtagtgttctcttggcacggtttttaccagaacgggggcggggatatccgcctggggggggaatttcatcagttgttgcatggctttccggactttttcccgccaggcggggaaatccttcggagccatatccggggaaaattcgcatgccggacgcagtttttccagcatggtctggacgatgccccgggaggaaacatgccgctggtcgctccgggatgaatgaagcaccgcccagtctgccgcccgggatttttcactgggcggggtaagggagaaggagggaagagaaagggatgccaatagaagagagaaaaaaacggcgggctgaatagtcatgaagccagattgccataaaagaagcttccattgcaaggttgcagcggtggtcttttcaggttgttcctgacgcatcggaagcttgagtttttccgggcagggcggtagtctggccgccgtcatgatggcggggggtaagagtcttggaagcccggaaccgcgggtatgcggcctgggcctggcttccggcttcggcatgggggcggcagtccatcttgccggggtaagggaagggcgcagagtgttgaagccgttgagcgaattgtggggcgaaggtaatccctggggcgatgtattgagcggatggattccagacagggaattgttatgcagccgcaggaacggccctgcttcccagctggcgctgctgttggcgcgccaggccgtggaggacgccggatggggaaggaaggaattgagggatgccgccctgattgtgggcagttcccgcgggaatgcttccggatggctgagcccgtggccgggacggcggcccatgaaaattttggccgttcccaattccctgcatagcgaacttgcttcctgcgtcagcatcgaattgggaatttgcgggccttatcacgtgctggcgagcggctgtgccgccggcctggatgccgtaggcatggccgccatgctgatgcggcagggagttgttaagagagcgctggctatcggtctggatttgcctttgtgccgggagctgctggggacgtactgggcctccggcatgctttcccgcaatggtttgaatgatccctacggccctctggccgacggcatgtgcatttccgagggaggggcggccatagccctggaattgtcttctgctccaggtatttatgtgaaggattatctggtgaattccgatgcctatagcccgctgggcatgccggaggacggaaagagcatagccgccctgctggaggctgctttgaaaagtcgggatggagcggttcctctgaccgtttgtccccatgccagcggcacggcggggaatagcgtgtccgaacgggctgctttgaaaagggtttttaaagacggactgccggatttgaggatgatgaagccgtggacggggcatgccattggaggcagcgggattttggaactggccctgatgctggtctttgccagggagggggtattgcctcccaatcctccctgggccaccttcccggaaggcggcgcctgttctgcggatgagttgccgttggccggggggcggatgctggtcaaatccgccgcttccatgggcggccataatgtggtgctgagtctggctgtggacggttgaatattgttgaatagtgaacgcttatgaagaatcctgaacagtttttgtcagagttgaagtctgcggggctgctgcgcgtcctgcgggatgtggaatgcctgcccggaggaatggcccgtctggcggatggccgggaagcggtcaatctggcaagcaacgattatctggggctggcccaccatccgtccctggcggaggctttttcccgtgcggtgcgggatgaaggggtcggagccatggcatcccgcctggtgacggggacgcggcgggaacattcctgtctggaagaggccctggccgctttgaaggggactgaagcggcggtcagtttttcctccggttatgctacctccctgggagtgattgcttctattgcggaccgggaggatacggtgctgatggataagttgtcccatgccagcctgattgacggggcgcgtttgtccggggcgcgtttgtctacgttcctgcataacgatatggagtcattaaggaaaaaactgcagcatttgcgggacgcgaatccttccggcgggattctggtagtgaccgaatccgttttcagcatggatggagaccgtgccccccttcgggaaattgtgcgtctgaaggatgaattcggcgcgttgctgctggtggatgaagctcacggattcggtgtgctgggagaacacggggccggactggcggaagagctgggtgtttcctcccggatagattttcaaatggggactttgagcaaggctgccggggtaagtggtggatatgtggcctgttcccgcgcctgggcggatgtaatggttaattccgcccggtccctgatttattccacggctccgcctcccgctttggccgccgccgccctggccgcggtggaagtgatccgcagcggggagggaaaggaattgcgccgccgtgtttccgtgctggcaaacagtttgtccgccgcactggggatgccgggaaggcctctttcttccattttccctgttgtggtgggagagaacgatgctgccctggctgcggcggatgccctgctagaacagggctttctggctcccgccatccgttatcctacggttccccgcggaacggcccggttgcgcattacggtaacggctgcgcatgaatccgggcaggtcacgcggctggggacggcgttgaaggagctgctgcatgggaagtaacgcaggcgttgtttttggttctccgcattggagccggttcctgtttttatgcggggcctgccggaaatgggattatcctcattgatgccgccataaaaaaggaagaaggatatctgatgcctggcggaacggaatgacatccggatgtcctgaatggcagagcttgcatcttgacagggaagttttcttccagtaaggggaaagaatgaaggttcccaaaggaattttcactgaaccctataaaataacgtcatgatgaatacttctgattcttcttccccttcgtcctgctgcagcggttctccttcctgcacggccgctcttgttctcggcattatcgccctggtattggcattgatcggttttttcccgtgcctgggctggattactctgattcctgcggggctgcttgccattattgcactgatcatgagcattgtggctgtcagtaaaggttcgcccaaaggggctcttgttgttgccattatcgcgttggccctgtccgccgttgcgggaattgtccaggcatggatggccagcgctaccgtgacttacatggaacagcaccaggattatgtggaaaagaaggctctggaaattcaaaaggagcttcggcagatggagcaggaaaacagggagtcattgaggcggtccggggaggcggatggaatgtcccctgcggatggaacaggctcccaggatttgtagttcctgaacctttttaggaagatcggcgatgaatggcgggcgctcttcatggcgttcatgccgtgatagctgggtagtcaggaaagtatggctgcctgtatgggctgttctgtcctgcctgttgctggcgccctccctcatggctctggcaattagccctgacaggatgaattctctggcggtttctgttgccgtgccgcatcgtgaatgcccgttgtgcggcatgacgcgagggtatgcggaaatggcccgtggggatatacgcgctgcctggggatggaaccgaggagctccggtcttgtttatggcaggactgctcaatggaggggctgccgcggtttatttggcatggtgctggcggagaagggcgggaagccgggaaaaggaaaatagttctcccgcgtagcatgccgcaaggggggaaccggcatcccctgtccccggtaaatgacacggcggaagttttgaagcggggcctgggaagttcttctgcctcctgtttattccctgtaacggggctggcgtctggtggggggacggaatgatgttgagtttttattgaatgaattccatgccaaattcctcgtagtgccgaagatgaagttccccggctcaggttgagtgttttgccggagggagctgcgttgttcctgaaaaggagaggggaatgcggcgcttgcgtttcatgccttaggattattttttgtcaggaaggggaatagcttttctgggaacggccggtatttccgttcatgaaaggagtatccgggggtgtggaatattttgatttttctttatttcggtattttgttgataatgttgttttctattaagttgtgtaattttctaacatttttattctaggcccggttgattttatatatatagtttttggatattgtatgaatatttgcatgtccatctatagatcaatcgaattgcggaagaatacatccggaagttataaggtccggctgactatcgaccggggaagcaagttctgcggcgccaggaaatctctcggtctcggcacccatcgggaggattgcgccctaagacgtgcctacctgatgcgatgcctgctgtttcatatgggatggtttcccggcggaaagattgccgtcaggaattcagccgaatgcggtatcaaggatgtggtttgggacagcatggagtgttcggaggattccggaatgttcaagcttgcaagcaggggaggccgcatggctgcggatgagaccatggccatctggttccagacgaatgaagacgggaaggtccagtgcctccgtctgctcatttccggatggaggaaggatgaccgggcggatgatttgagggtgctgattcagggaatgcggcattgcgcctcggaacagcgccagcatccctgccggattttgaatattgaaatcggcgcaagctctttcgcggcatcccgggatgaatgtgtgctgaaaggataggaaaacggattgttcctgataccagtttatcctggttttattctgaagacgccacattccggttgggaaatccggctgtatgtccggcatgcctggcccggagttttttttgctcgtcattgacgacgggaaggttgtccgtattccgggcgaggcgaaggcgcgggaggaatggtgcgctgtctgccgggaaagggagttttgtttttcctgcatgaaaaaacccccggatggaatgattgccatccgggggtttgtttaagggatccggctattttttagcgggcagtttcacctgaatgtgaatgtcgcgcagctgacggtcttccgcggcggcgggggagtcgctcatcagatccgctccccggttgtttttcgggaatgcgatgacttcgcggatggattccgcgttgcaaatcatcatgaccaggcggtcgaggcccagcgcaaggccaccgtggggcggagcgccgaagctgaaagcgtccagaatgtggccgaattgttcgcgggcctgttcttccgtgatgccgagcgccttgaacatggcggactgcaggtcgcgttcatggatgcggatggaaccgcctcccagctccgtgccgttgagcaccacgtcgtaggcctgcgcgcgaaggtctgcggagagttccccgctgagcagtttttgttcgtcttccttgacggggcgggtaaaggggtggtggatggcgacccagcgctgctcttcctcatcccagcccaccagcgggaattcaataacccacaggaagtcgcgttccttgttgtccttgagcagttccatgaattcggcgcattgcaggcgcacgcggcccaggatatcgcaggagggttcccacgggctggcggcaaaaagaacgaggtctcctgtttcgatgtccagggcttccgtgagtttttgcttttcttcgtcggaaaggaatttggagatggggcttctccagtcttcctcgcgcaccttgatgtaggccaggcctttggctccggcttccacggcagttttcgtcagggcgtcaatctggccaacggaggcggaaccgaatcccttggcgttgatggccttgaccacgccgccgttgcttacggctgaggcgaataccttgaagccgctgttttcaaagatggaggagacgtccgtcagcttcatgccgaagcggcgttccggcttgtcggaaccgtactgatccattgcttccttccaggtcatgcgggggaagggggtgggaatgtccacgcccagggattccttgtacacgcgtttgagcaggccttccaccaggttgtagatgtcttccggcgtgatgaaggaagcttcaatgtccacctgggtgaattccggttggcggtccgcgcgcaggtcttcgtcacggaagcagcgggcaatttggaaatagcgttccatgccagccaccatgagcagctgcttgtattgctgcggggcctggggcagcgcgtagaatttgccgggcgccaggcgggagggcaccaggaagtcccgtgcgccttccggcgtagatttggagaggatgggcgtttcaatttccagaaagccgtactcgtccagatagtcgcgcgtggctttggtgacgcggtggcggatctgcatgttgcgggccatggccgggcggcgcaggtccagaaagcggtatttgaggcgcaggtcttcgttggagagggcccgatccagctggaaggggagcacgtcagccttgttgatgacgttcagggtgtctgcggagacttcgatttccccggtggggaggtccgcattggtcgtgtccaccgtatccgttttcaggcgggcggccacggtgccggaaatctggatcatgtcttcggagcggagctgctgggaggctttcgctacatcctgattgacttccgggtgaaagactacctgcgtgatgccggagcggtcgcgcaagtcgataaatatgacgccgccatggtcccggacggaatctacccagccgatgagggtggtcggcttgccgatgttcgcagcgcgcaattcgctgcaggtatgagtgcggtatgagttcatctttattgaaaatggaagaaggggaaagaacggtgtcaattgcttccggtgagtgaagccacggcgtcaaacaggtcgtccatggcgacgggggatgaggtgcgcgcgcccaggtcgcgaagttccatgaccgggaattcatctcccacgatcaaggccgcgcgggcgccggatttgacggccttctgaagctgtccgttgactttggtgagcgtgaggggaaggtccacactatatccctggtcccggagggcggaggcgatggcaagaacttccgcgcggcggctttcagacgcctgaaccatgaagatgtcgcagcctgcagaggccagcgccgcatctttcagcgccctggcatggggcgtctgttcaataaggtgggtgatgacggcatcccccatggcaaagccggttgccggcatgtccactgcgttgttggaaagggcgcctaccagcgtgtcgtaacgtcctcctgcggctacggcgcgcaggctgcgctgtgtgtcaaagatttcaaaaaccagaccggtgtagtatgccagtccgcgcactacggataagtccagcttgacatagccgtccagcccgcgggccgtcaggtctttcatcaggatgtcatagcgttcggacgctccggcgggcgggttttcaatgaaggccaccagatcgccgcggctgatatgaaaggcgtccagcttgcgctggcattcttccgggcggtcacgttcaaatttgtccacgatgccgaggaaagcgggaatatcctgttcctgcacgccgtgttccgaagcaaacctgatccaggcttcccggtcagagacgcgcacaatgaagtcgttttgcgtaaagcccagttccctcatgcagtcgatggccagggctatcagttcggaatccgcccacgcggaggcttctcccagaatgtccgcattgaattgataaaattcgcgcagacgccctttctggggtttttcataacggaagcatgagccgatttcaaaccacttgagcggtttggtgtattcgcgctgataagcggctgcgatgcgtcccagggaggcggtgagttccgggcggatggtgatgtcccggtccccctggtccgtgaagcggaagagctgggtgggcagctcgcctccgctctttttaagataaagctccgtggcttccacagtcgggccctcccattccaggaatccgtaacgatgcgccaccttcttccatgcgttgaaaagatagttgcgaacggcgcagtccgccggtgcaaaatcgcggaatccgggaagtggttgaaagcgagcgtctggcataacctggaaaaaaggatgttgtctgaggacgaaacagtttacagaattcctatgccttggcaagtccacatgcttatgatgaaggaatttcggtggaaaccagatgaatgaccctatgcaggaggatggggacggttattccggttttacatgaagtgagggagggaaaaggattaattattggcgattttagtgttttttataatgatccggattttttgcgcgggctatggggaatgaaggtttaagtgcctgcggatttgtaaccggatgtcaaacaatgatattgaacagcaaggggaaatgataagaaggtgttctcaaaagtttttctgcgtatggagcatttcatctttccctttatagaaaaatattttcctcccgctttaaaaagaaaaccggggcagttttgtttgatttcataggagtatgacgtgaaacgaatgagttttttttctctttgggaatctaatatcagtattgattatgtgtaaagaatgtggatgcgggggggagctctcccatgaaagtcacggccacggcatggacgtccatgttccagtgttggatgccaatgaccggctggcagagcgcaacagaggtttttttgctgcaaaaaaccttttggttatcaatgtcttttcttctccggggtcaggaaagacttctctgttgcagaagacggcggagatgctccgcggccgtgtgcgcatgggggttatcgtaggggatttggcgacggataatgatgcggaacgcctgagccgagcggatatccccgtggtgcagattacaacgggcaccatgtgccatctggacgcccgcatgattgcggaggccatgaagaaaatgcctctggacgatctcgacgttttgattattgagaatgtgggcaatctggtttgcccggcttcctatgacctgggggaaggcgtgcgcgtggtgctgctttccgtgacggagggtgaggacaagccgttgaaatatcctcccatgttccattctgcggatgttgccctggtgaccaagtccgatctggcggatgccgtggattttaaccgtgacgccgccctggccgcgctgaacaaggtggctcaccatgcgcacgtgattgaggtttcttccaagaccggcgaaggaatggaggcctggtgcgaggagattgtggaacgtgcgcgccgcgcccgggaaggcacgattcagcatcatggccatcaccaccattgaacaggccgccgcggcattgaaatttgagatagccggcatggttcagggggtcggcttccgtccccatgtgtaccgtttggcggtacggcacggattgaaggggtttgtgcgcaatacggagtccggcgtggagattcatgtggaaggggagcccggcgctccggagcgtttctggaccgcgctgatggacggcctgccggagcatgcccgggtttatggagtggagcggaccgtatgcgagcctgccggttttgaggaattccgcattgaagaaagcgattccacccccggaggcgttccggtgatgctgccggatctggctccgtgcccggagtgcctggaagaaatgcacgacccgttttcccgccggtatcattatccgtttaccaactgtacgcactgcggtccccgctattccattattgagacaatgccgtatgaccgcgcgggcaccagcatgaaggggttccgaatgtgtccggagtgccggagggagtaccaggatgtggaggacaggcgttttcacgcacagcctatcggctgtccgtcctgcggtccttccgtgaaggtgctgttttcagatggttcagaactggggttcggccatgggtttgatacccccgcggcacaggcggcatgggtgctggcggacggtttgattgtggccctgctgggcgtaggaggttttcaattgctggcggatgcttcttcggaagctgccgtcaggcgtctccggcggttgaaggagcgtgacgccaagccttttgccgtgatggtgccggatgtggctgcggcggagaggctgtgccgcctgtcggaggaggaaaggcgcctgctggcttctccggccgcccccattgtgctggcccgggggaggaaggatgtggatctggctccttccgtgtgcatgttcagccgttttgtggggataatgcttccgtcttcccctcttcatgcgctgctgatggatgtgtggggaaagcctctggtggtgaccagcgggaacctgagcggcgagcccctgtgcgtctccgtggaggaggggctggagaaactgggccatgtggcggatgtgtttttggtgcatgaccgtccggtagtgcggcccgtggacgattccgtggtccgcgttacggacggcaggaccatgatggttcgccgcgcccgcggatatgccccgcggcctgtgtggcgcacatctgcagcggctcccgacgtgctcgccctgggggccggactgaagaataccatctgctggctgaaaaggggcgtggctgtcatgagccagcatctcggtgacctgagcagtgcggcttccctgaacgcttttgagcggacggtggaggcgctgggcagaaccctggatgccgttccgcaggtaattgccgtggacgcccatccggacggccccacttttgcccttggccggcgtctggcgcggaagtggaatgcaacggttgtccctgtgcagcatcatcaggctcatgtgctggcctgcgccgtggaaaatgaaacgccgtttcccgctttgggcatagcttgggacgggacggggttcggtacggacggaacggtatggggaggggatttttttgtgttggaggaagagggtgagccgcgcagggtggcccgcctcaggccgtttcttcttcccggtggggacgaagcggttcgggagccttcccggtgcgcctgttccctggcccgtcagatggggccgtggcgtacggaggggcttgataagcgtctggagagggggctgcctgtgcggaaacgcgaagttctggaggcgatgatggcccggaatatccattgtccgtcctcttcgtccatggggcggttgtttgatgccgtggctttctggtgcggttttgacggtgcggcggggtgtgagggccatgccgccatgatgctggaatcatgggccgcggaagcttccggggaaaaaatgccgggggacgcgtatgaatgggtcatgcatgaagaagagggattgctggaactggattggcggccgttgatgaagtctgtggatgaagatttgttggaaggcgtttcccgcggctgcatcgcccgcaagtttcatgagagcctggtgaatctggtctttgacgtggcggagcgtttctgcctggataggctggtgctgggcggcggatgttttcagaatgcctttttgcttgaaggactggcgggaatggcccagtctagaaggtgccagttggctctgccccagcgggtgccgtgcaatgacgggggaatttccctggggcaggttgcggcggtcgtacgccaatggaaaggatagaatatgtgtttggccgttcccggaaagattgtgagcgtcaatgagacggaccctttgttcagattgggggtggtggattttggcggcgtgacccgtgaagtgaacctggcctgtgtgccggaagccgtgccgggggattacgtcatcgttcacgtgggcatggccctgagcgtgctggacgaggagaccgctcttcaaacccgcagggaaatgagagaaattgtggaaaatacggatccgctgtagggagggacgttttccgaattcaattaatgatttatgcaggaggaagttcggcagctgattgaagaattgcgccacgctgtgacgcgtccgtgggcggtaatggaggtatgcggaggccagacgcatgcgattgcttctctggggctggaggagttgctgcctcccggcctgcgcctgattcatggtcccggctgtccggtctgcgttacggcggtggagttgattgaccaggccgtggaattaagcctgaggcccggcgtggttttgtgcagctacggggatatgatgcgggtgccgggctcccgcggggatttgttttccgccaaggccgggggagggaacgtgcttttgatgtattctccgctggaagcggtcgcttatgccggaagccatccggatacggaagtggtgtttttcgccgtaggttttgagacgacggccccggctacggctcttgccctgcagcaggcccgtgcactgggatatgccaatttttccgttctctgcgcccatgtgctggtccccccggctctggaatggctgatggaccaggatgagggaaggccggacgcttttttggctcccggccatgtctgcgccgtcacgggggaaatggattacgggcgtttggccgcccgttaccggacgcccatggtggtgacggggtttgaggcgccggacctgctccgcggcattctgatgtgcgtccgccagctggaagccggggaatatgcagtgcggaatgcgtacggacgttatgtgaagcccggtgggaacagggcggcacaggaaagaatgaatgaagtttttgagccggaagaccgccgttggcgcggtctggggctgattccctgcggcggcatgaggctgcgccgtgagtggaatgacatggatgccgttctgcgttttgaatgcggaaaggggaggccgggagcggatgaagcttccggatgcctggccgggcaggtgctgagggggctgattcgtcctggagagtgcccttttttcggatcgtcctgcacgccgctggccccgctgggggctcccatggtgtccggggaaggggcttgcgccgcttattatcattataaaagaagttgatgtcatgtttgagtgtcctgttccggagcctgtttccgaccgtatccagatggctcacggcggcggaggccgcttgatgaatgagctgatccgttccgtgtttctgagcgccttcgggtgcccttccggaggcgtgcagaatgacgccgccgtattggagattcctccggggaggctggcgatgacgacggacagctttgtggtgcagcctttggagtttcccggcggctccatcggttcactggcggtgcacggaacggtgaatgatctcgccatgagcggcgcggagccgttgtatttgacggcgggttttattctggaagaagggcttccgctggaagtcctggcccgcgtggcacaagatatggctgccgcggcccgtgcggcgggcgttcgtgttgtgacgggggatacaaaagtggtggagcgcggaaagggggacggcatttacattaatactgccggggttggcatcgtgcgccatggggtggagatcagcccttcttccgttcgtccgggggattccgtgctgctcagcggggatttggggaggcacggcatgacgattatgagcctgcgcgccgggctgtctttcggagacggcctggaaagtgattccgctccgttgcatgaatccgtggccgccgtcattcgtgccagcattcccgtgcattgcctgcgtgacgtgacccgcggcgggttgaccgccactctttcggagattgcggaatctgccggcctgacagtgaagctgaatgaaatgtccattcccgtgcgtgaggatgtcagggcggcgtgcgggctgttggggctggaccctcttcaagtggcctgtgagggacgttatctggctgttcttccacgggagcatgaggaagaggccctgaacctgatgcgcggctgcggcgtatctgccggagcctgcgtcataggccgggtggaggaattggggacggcgcccctgctgatgacgggacttcttggagtggagcgggtgttgacgatgccttcaggaatgcagcttccccgcatctgctgattcctggtgctgcatgattggcgttttgtggcagggaagcggtggaacccgcttccctgccggtccggtgtttcataggggtgccggagcggctctgtgcgcttccgggggaaagcgcagccagcttgatatggggaactggttgttgggagatggttcaggagggagtgtctttacctgtcccggcatcgggcaatgcttttaatgccgctttggcctgtgcatggtcctgggaggctgccttttccagccattcccgggcagtttccaggtttttttccacgccgaatccgtacaggcagatgattcccatgttgtattgctcggaggcgtagccagctctggcggcgcgaagattcctgttttgccattccctggcttccgcttccgtgaagtcctggctcttgcagaattggtcccacgtttttccgaatttcatggcagccctcgcaaatcccgacagggcggattttctggtgtattcatccgccaggcgcatgtttttttccactccgtcgggtcccagcctgtacaggtgggccagtccccagtatccgttggggctgcccagatccgccgctttttggaagagctgcagcgcgtccgggtattttttatgggacatggcgaataccgcattggccaggaagcgttccgctttgatgaattcgtaaaattcgggaatagccgcccattcggatttaagtttgttcctgtctttcctggatttgggaggcatgccggaaggcggggatattcggaaaacgggaatgtagccggaagcgcccatattggccagcccggccatcagaaagcagcccggctggaggcgccacatgtgcatgtacaaaacgcgctctgctggcagagattccttctcaatccagtccggcaggttcatgggggggccgtaaagtcccgtcaggccgttcagcatgcgcttgtacagggatttcaggcgcgtatcgtattcctctttacccgctttggtggtggagtaaaaggaaacggctttcagacctccatcctttccgtactcgaaatgcagggagaagaaaaggcctccaataggttttttcgtcttgtaggctccgttcagccctgtacggctcaggtaggcgtctgtttccggcccttccagggatttgcaggttttcagggaattcagaagctgggattcctgcaaacctgtttccagggggccgtaaagaggcgaggcggcgccgcaggaagctgtataaagcacagccatgtagcgatagcaattggtcaatttcatggaatagatagggcagggatggaagtggtgcttcaatagcggattaggaatccgaatgaagtgttcaaagatgtttttatgaaaagcaagtatattacaatcaatagtttatattttgttccaacaaatttattttgttgagggttgtgtccgggaaaatgatggatgattttggagaaatgcatttggtatgaaaaactgatattgacgtcggattcctaatccgcagtgtttaaaataggttgaaaaatgttggttaacctttttgttatcagcatattaaaaatatgcatcctgttttcctgaagtgaaaaaggcggaaaggcgcgtctgttgtcccgcctcattcttccgttttttttacatggaaattgttattatttttattaaaagtctttctgaatattcattcatttccgttttgtgtatcccatatgcatgcattgtggcggatttcaaatccgcatgtcagcgaaaaaaggaactggtgcttccttattgattttattatcaatggataaaatcaatattggggattgtttctttcaggatgcgttgtgatttttttctttctctatacgatgaaagtccttttttctcaaaaaatttgattgactgcggatttgaaatgcgcagatgaacgcgcatggattgagagcgtttgatattcaatgggctgtttctttttttgcagtaatacgcagttttggaagatgtcctgataaaaaaagagggctcatgatacgtacccgtacgggaaaaacgggaaggccgtggcggaattgctccggagcggctgttgattttgccggggctgcgagcataaccggatgtttgtgacggtttcgtttccggccgcatcttgtttgaggaagccattccgctcatggtaccggtacatgagaattgatgtggtaacggatacgtatgaacctgatataaatggagtggccctgacgctggggcgtctggtcggcggcctccggatgcgcgggcatctggtgcatgtgatgagggcttctgaacggaacggctctttcgaccctggggagacggctatgccgtcccttcccctccccatgtaccatgaggtgaagatagggctgccttctgcagacaggttccgcgccagatggatgaaaaaaaggccggatgtggtatacgtggctacggaaagccccatgggagcgtctgccgtgaaggccgcccgtacgctggaggttcccgtggtgatgggattccataccaatttccaccagtatatgaaggattaccatttctccagactggaaacggccgccgtgaattacctgcgcaaactccacaacagggcagggatgacagtggttcccacggaggaaatgcgccgtacgctggaggggatggggtttgaacgcctttccgtcatggggcgcggagtggatgccgtcctgtttgatcccgccaggagggatgcttccctgcgccagtcatggggcgtctggcgggatgaattggtatttggcgtcgtggggcgtctggcgcgggaaaagaacctggtgacggccctggggctgtacacgcgcttgcagagggagtttccggattgcggcatgaaaatggtggtggtaggggacggccccatgatgaacagcctgcgcagtgagtttcctgatgccgttttttgcggaatgcgccgtggggaagacttggcgcgccattatgccgccatggacgttttgctgttcgccagtgagacggaaactttcgggaacgttttgctggaaggcatggccagcggtttggctacggtcagctaccggtatgccgcttccgcggatgtggtgctggacggcatcaacggccttcaggcggagaaaggggatgaagaggggttttattccgccatgcgccgtctgctggaagacggggagatgatccggaggcttgggaaacaggcccgcaggacggtgaattccagaacttgggattccatccatgacaggtttgaagaactgctggcttccgtggcccgggaggaaaacgggaccggctgcgcccgccccccgcgggatgccgtgctggaatgccgcacggtttttttgtcggaccttcatctgggaacgaaagactgcaaggcggacgaatgccggaagtttctgaaacatgtccgggctggaaaaattgtgctggtgggggatattgtggatgcctgggctttgtcccgcggcagccgctggcggcggaggcatacgcgctttgtccgcaccttgttgaaaaagatggaacaggaggatgtggaagtcctgtacctgcgcggaaaccacgatgatattctggaaaaattcctgccttttcatctgggcggtttgaaaattgccagggagtacgtgcaccaggctgcggatggaagacgctacctgtgcgtgcatggggacggttttgacgccatttccaccaatcaccggtggctggcgatgctcggctctctgggttatgacgttttgctgatggtcaaccggttttacaacaaataccgcgcctggcggggcagggaatattattccgtttcccgcgccatcaagggccgcgtgaaatccgccgtcaattttatcggaaaatatgaggaacagcttcaacgcctggcggtaaagaggcagtgtgacggcatcatcgccgggcatgtgcatcatccggcggataccatggtgggaaaggtgaggtatctgaattgcggggactgggtggaaaccatgagcgcagtgctggaatacggcgacggccgtatggaaacggtgctttacaaggattttatgaagcgcctggcatatggcaaatgcggaaccatggaggacgcggaaacttctcccggcacgggggattcatgacggaacggcctttatccggtttccctcggaagtgggacaaaatgactttgtgtgacattttgtctcttttctggtgtgacattatgtcccgttttcctttgtcgggaaaatagaggaatgaaaggaaaaacagcgtaatatgattataatatgacatttatgtttatttttcagtatgccttgccagattggcatgccatttgcaacaaaagaggcaagaatatgagtttgcctgcatgatgcttcaggtcatgaggaaatcaaatctcaacgaaatccattcaaaacaatctaaaataacgatatggctaaaatattaggaatcgaccttggcacgaccaactcgtgcatggctgtgatggaaggcggtcagggtaccgtacttgaaaacagcgaaggtgcgcgcaccactccctccattgttgctttcaccaaaagcggtgaacgcctcgtggggcaggccgccaaacgtcaggcggtaaccaacccgaaaaacaccgtgttttcctccaagcgcctcatcggccgtaagtacagtgaactgacggaagaagataaaaaggtgccgtacgaaattgtggaagctcccaacggagatgcctacatccgcgtggatgtgggcggtgaaaagaagaccttttccccccaggaaatcgcttccatggtgctggccaagctgaaagccgatgcggaatccaaacttggcgaaacgattacggaggccgtgattaccgtccccgcctatttcaatgacgcccagcgcaacgcgaccaaggccgccggtgaaatcgcaggccttaaagtgcgccgcattatcaatgaaccgacggcggcggccctggcctacggcttggacaaaaagtccaatgaaaacattgccgtatatgacctcggcggcggcacctttgatatttccgtgctggaaatcggcgacggagtgtttgaggtgaaggcttccgacggtgacacccacttaggcggcgatgactgggacaacgcaatcatcaactggattataggcgagttcaagaaagactccggcatggatctttccaaccagcctgatgccattcagcgcatcaaggaagaagcggaaaaggccaagatcgccctttcctccacccagagctatgacatcagcctgccgttcatcacggcggacgcttccggtcccaagcatatccaactgacgctgagccgccccaagctggaacagctcacggaagaccttctggaccgcacccgcaagcctgtgctggactgcattgctgcgtccgggttgaaaaccggggacattgacgagctggtgctggtgggtggcatgacccgcatgcccgccgtgcaggaaatggcccatacgctggccgacaaggaaccccacaagggcgtgaacccggatgaagtggtggccctgggcgccgctattcagggcggcgtgcttcagggggacgtgaatgacgtgcttctgctggacgtgactcctctgaccttgtccattgaaacgatgggcggcatcgccactccgatgatcgaacgcaacacgaccattccggtgcgcaagagccaggtgttctccaccgccgctgataaccagcccgccgtggatatccgcatttgccagggcgaacgcaagatgtttgaggataacaagctcctcggcaacttcaagctggacggcatttcccccgctccgcgcggcgtgccgcagattgaagtgacctttgacattgacgccaacggcattctgcatgtatccgctaaggacaagggcaccggcaaggagcagaaaatttccatccagggctccagcggcctttccaaggatgaaattgagcgtgccaagcgcgatgcggaagcccacgcggaagaagacaagaaacgcgctgaggaaattgacaccattaaccaggctgactccctctgcttctccgtggagcgccagcttaaggatatgggggacaagctgcccgcagacctcaagcgtgaaatagaagacaaggtaacgcgtctcaaggaagccgtctccaagaaggacgtcacggcgatcaaggctggcaaggaagacctggaatcccgtctggaagccctgtacaaggcggcggaagccgcccagcagtccgccggggcagccggccccatgccgggcgcccctgccgaagaagagccttccgacggtccccgcaaggcgaaaggccgcgtggtggacgctgaaatcgtggacgacgataaataagcaacccccttcccgccggagggggaagcaattccccctccggcggaacattacatcccgtattactcatctacaacaacatcaaaaaacatactatggcaaacatcaaacccctaggacaacgtgtgctggtcaagcgcattgaagctgaaaccaagacggtcggcggcctgttcctgccggacaccgccaaggaaaaaccccaggaagctgaagtgatctccgtaggcaccggtggccgcgatgaaaaaggcgccctgattgaatttaccgtgaagcccggagaccgcgtgcttatttccaagtacggcggcacggaaatcaaactggacggggaagactaccttatcctgtctgaaaacgatattctggccatcatcggctaaatggcaccacacacacattcaacatcattttaaatatttaacattatggctaaacaaatccaatttgacgaaaccgcccgccaggctctgctccgcggcgtggaacagattgccaaggctgtcaagagcacgctgggccctgcttaccgcaacgtagtgattgacaaaaaattcggttcccccctcatcactaaggacggcgtaaccgtggccaaggaaattgaactggaagacccgtttgaaaacatgggcgcccagcttgtccgggaagtatcttccaaaaccaatgatgtggctagcgacggcactactaccgctaccgtgctggctgaaagcatttaccgcgaaggcctgcgcaacgttactgccggggctaaccccatctccctccagaggggcatcatgaaggctgcggattccgttgtggaagaactcaagaagatcagcaagcctgtcgactccagcaaggaagtggcccaggtcgctaccgtctccgccaactgggacgctgaaatcggcaacattatcgcggaagccatggacaaggtgggcaaggacggcaccatcaccgtggaagaagccaagggcattgaaactacgctggacgtggtggaaggcatgcagtttgacaagggatacctgtccccctacttcgtgacgaacgcggaaacgatggaagcggtgctggaaaacccctacatcctcatccacgaaaagaaaatcaacaacctgaaggacttccttccgctgcttgaaaaagtggccaagagcggccgtcccttcctggtaatcgcggaagacattgaaggcgaagccctcgccaccctggtagtcaaccgtctgcgcggcgtgctgaacatctgcgcggtcaaggctcccggcttcggcgaccgccgcaaggccatgatggaagacatcgccatccttaccggcggcaagtgcatcacggaagacctgggcatcaagctggaaaacgtgggaatcgaagacctcggccaggccaaacgcgtggttgtttccaaggatgaaaccgttatcgtggaaggttccggcaaatcttccgatattgaggcccgcatttcccagattcgccgccagatcaaggacaccacgtccgactacgaccgcgaaaaactccaggaacgcctggccaagctggccagcggcgtggccgtcatccacgtgggtgccgctacggaaacggaaatgaaggaaaagaaggcccgtgtggacgacgccctgcacgctacccgcgctgcggtggaagaaggcatcgttcccggcggcggcgtggcgctgattcgcgcccagaaagccattgacaccctcaaactggaaggtgacgaagcaactggcgcccagatcgtttatcgcgctgtggaagccccgctccgccagctggcctgcaatgccggccgcgaaggagccctcatcgtcgccaacgtgaaaggcatgaagaatactgccgaaggttacaacgtggccacggacaagtatgaagacctgctttccgccggcgtggtggatccgaccaaggtgacccgttccgctctgcagaatgcggcctccatcgccggcctgctgcttaccacggaatgcgtcattgctgacaagcccgagaagaagagctgcagctgcggctccggagcttccgacatgggcggcatgggaggaatgggcggcatgggcatgatgtaagccccgtccgttttttcgagaccaaggcaatcggcttcaaggctccccggtttttccggggagccttttttaatatgcttcatcaggagccggtttcgggaaaaaagctgcacaggatgttcagaatttagaaaaatattgaatgattatagaacatatttgtctaatcataacatgaaaaagctgcataagaacatattgtttgcggcggcggtactggccatgccttctgccctggccgatatcccggagtcttccgttccggctgccgccgtttccagtatcaagggtgcttatccgaacgccggtcccattgaatgggactctgaaatgcatggcatggaaaggatctacgaagccgaatttagaattaacggattccagtttgacgtgaagattgctcctgatgggaaaattgtgaggattaaggaagaagtagctgcttcctctcttccggaagccgtccgtgcgtccgttttgaagcgttatccgggatgccggattaaggaagcggaaaaaattactgaaggagaacttgtccgctacaaggtggaagttgcggacagccgtgacgattatgatgtgctgattgcccctgacggaaatatccttcatgtggaccgttaggctttttgttttttacatttaatgaaagcgggaggagggcggatgaatccgctctcctccttttttgaggatcggaagcaggggcgtatgggaaaatgtgacggaatgttcacgttttaaaacgggcgtgcgggagcggcctcctgtaatagagggccgtttactacgcatatggacccgatctattactttatcataggactgatactggtgttatcctgcttcgacctcgttgtcggagtttccaatgacgccgccaactttttgaactccgccgtcggttccaaggccgctccgcgcaggacgattgtgctggtggccgctttgggtatcatcatcggctcgctgttctccagcggcatgatggaaatcgccagaagcggcgtattcatgccggcccggttttccttccatgacatcatgttgatctttctggcggtcatgttgacggatgttatcctgctggacgttttcaacacgttcggccttcccacttccaccacggtttccattgtttttgaactgctgggcggagccgtggccgcagctctctttaaaatttggtccggggaaccgggcgtcgctcaggaattgtccagctacatcaattcctccaaagctctggcgatcatctccggcattttttcctccgtttttatcgctttcatttgcgggataacggttatgtggatttcccgcctcatcttctccttcaactatcaaaaatccttcaaatacctgggcgccgtctggtgcggcgtggccctgacggctatcacttacttcgccattttcaaggggctgaagggaagcacgctggtcaccaaggatatgatccgccacctggacgcccatatctggctgtacgtttgctgcagcctggcattctggaccgtcctgatggccgtgctccagaatctttgcaaagtcaatatcctgaaagtatccgttctcgcgggcaccatggccctggccctttcctttgccgggaatgacctggtcaacttcatcggcgttttcatggcggggcagtcttctatggaaattgcggccgccgccgcagcgcagggggcggaccttaccactctgtccatgggcggtctgatggcccccgtcacggcggattggcgttacctgctgggggcgggcgtcatcatggtgctggccctcatgttctccaaaaaggcgcaaaccgttacggatacggaagtcaatctggcgaggcagggcgggggagtagagcggttcggctccgtccccccggcccgcatggcggtgcgctatgccctgaatgcttcccgcgcggtggaaaaaatcatgccctcctgcgtcgggaggtttattgaaaaacgcttccggcctgtgccggaagggccggataacggtgcatctttcgacctcattcgcgcttccgtgaatttgacggtggctgccctgctgatttctctggccacgtcccttcggcttcccctttccaccacatatgtgacgttcatggtggcgatgggttcctccctggcggacaaggcctgggggcgggacagcgccgtgtatcgcatcaccggagtgattacggtgatttcagggtggttttttacggcctttgccgcgttttccatgtgcttcattgtggcggcctgcatcctttatggcggtctctttggcatcatcgccatgtgttcgctggcggcttttctgcttctgaaaagttccaggctccatcgtaaaagaacccaggctgcagctcaggcgcaggccgccaattaccgggatccggctgccgccgcacgctacaatgaggaaattattgaactgatgaagcgcatggcggaaatctatgaaatgaatctggaggccctgaacgtggaggacaggaagcgtctgaaaaaactccggaaagaagcgcgcggcatccgccgttccctgagcgataaaatggcgatggaagtcatgcccgtcgtccgtgaactcccggacaaagaggccgaccgaggcaagcgctatgtgcagatggtggaatacgctacctccgtctttgaatccctctccaacattactacggccagccatgcctatatagacaacaaccatgaagggctggatttggaaaggatagagcttctgcggggaatgaacagccgtgtttcctccctctacccccgtttccgggaaatgatggaaagcaatgactataccgggttggacgaatgcctggcaggcatggacgccctggatgaggaatttgcggaagccgtcaaacagcagattattctgcgtccggaagacgcctccgatatgcgacgggcgcttctctatctcaacctccttaatgaaacccggacaatgatccgcaaagtacttcttcttgctaaaatccagagaaaatttgttcttggctggtagcctctccctgtaattcacgtccgtgccggcggcgaatgcttccggcgcggacatcttgcccagactgttcccgtattgggagtagctgccaggtcttttttattcacacggaacaaggcttctttacggataaaccatgtcttctgcctgtgggacaatgtcttgaaaggccgtttccaggcgttgccatgtatgttgccgtctcaagaaaacaaaaaacgcaagctttgataaacaataacttgcggaacaaattggtacgggcgatgggaatcgaacccacgtctcaagcttgggaagctcgcgtcctaccattgaacgacgcccgcatgaaatgcggatgcctatttagcggcagaaggcccggatgtcaagaccgcagaaaaaacgtatcctctttttttgttattttgacgcagtaatgaaaaaaaacttgtcttatcccgtgatttgaacataatgcgttcgttgcgcgggtatagcttaatggtaaagctccagccttccaagctgattatacgggttcgattcccgttacccgctccatttttttattaaattcacctgctaaatacttcctttatgaaagccaggttcgtgacaaaggcggcgcttagtgcgctggcacttgcgtttgcgggtacccttcccggtatggctcagcaaactgcttctccggcagccgctccggctgttgatcaggttaaagcctccgctgttgaaaaggcttttatgaagaaaatggcagatattgttcaggccggattgaaagccggtgctctggatatgaaagcggtgtccggagttttgaacgatgccgctaaggctggtgtgtccgatcatgtgatgggtgcgatggtatccatggctgcgggcgctttcccgtccaacgctcctgccgttgcttccgccgctgtccggagctacgggcccggggtgaaggaagaacaggtgcgcaatgtgatcgcttccgctgtttcctcccagccccatccgtatgcatccgtggctcccatttcggaagcggttgaaaaagctttgggcaattctccggtagccggtactgttccttccattgctgtggccgtggctgcccagactcctgataaccccctctcaggggtaactgtccaggaacatggcctggtaaagcctgttgaagatgttgccgggggctccctggttctgccgggcggtcttcctgtgggcggcacgcccaccagccccgctcccgtgtccaatgctgctggcaattaacctgattcttatttaataaaatagcatgaagagtcttttttatctctccctggtggccgcaagcatgtttgccgtccatgccaacgggcagtctctgtacacgctggcgggtccggttggtctggaagagtcccttcctctcaagtggttcttcaacctggcgggagggtatgacgacaatgtcaacgcctccaattataacaagcaggaatccgcattcatcagtacggacatagggtgctccctggccaactacgatgccgtgacccaatattctttctccgccaagctggggggtattttttacctgaaagaccttgatggcggaacgaatgaagccctttccaattccacgctgtccgccaaactttcccatagttttgaccagactttgcgttataacggcagcgtctcctttgcatggcagccggaacccaactattccaacggtattgccaatgcccgccgggacggcgactacatttacgtgtatgtttccagttccgtgagcaaggcgtggacttcccgctattccacgacgctgggtgccaatttctccatgatcgactatcaggaggattccgccaagacggataaccgcgattatgttggcatgaatttcaccaaccggtacaaatggacggaacgtctggctgtttccctgggctggacgggttcctactgtaatcgcgaatacggcaataacgaattttccaacttcgtcatggcaagcgctgaatatgcggtgagcgaaaatacttctgctacgctgcgcgtaggtcctcagttcaagtatgtcgagaactacggaacaaaaacctatccctccgcggaattcggcttaaaccaccgcttgagcgaccggttcatgctcggaacgttcgtccgttattccaacgaagcggtgaatacctacatcccttacaacggcgccagctattactccaatgaaacgtggcgtttcggggtacacagcacgctgaagctgacgcaccgcgtcagtctgaattgcggagtaaacctgattgccagcgattatacgcgtccgagttccatcagcaacagtgacacgtccaacctgactttcaatgctaccgccggtatcaagcttctgctgacgaatgccctggcccttacggcccaatattcctacacgaacggttcctacagcggctataactacccgatgccttcctacaaccgcaacgtgttctccttcggcgtgaattacagcttctaagtcttgactgaccattaatgcctttactcctctaattgcgaattttcattcacaattagaggagtttttatcttactgccttactatattccatgagtgcccaggatcagcagaacagtgatcgcatcgtacgcaatattgactatttgcaagttttaaaaaatcgctggaaggaagtctttcttgttttccttctggtgctggtcatttctgtggtagtgactttcttgatgccgccctcctaccgggcgaccagccagtttcagattaaactgcccaagcctgtgatggatataggcagggggggggacgtggttgccacttccaacgtgacggccaactacattcccatgcagtattccgtgctgacttccgccgaagtgcttaaagtggtatccagaaaactgaaccttgccgcggaatgggggatgacggatgaaatggcggcgactaatctggcaagcatgattaaggtggcccctgtgcgtgccacggaccttgtggatgtcattgtttccggtccggatcccaaactggtgcagaatattgccaaggcggtgcctgaggcgtacaagcaggaccgtgaaatgcgcgaaaaccgtctggtggaaaccgccatcaagagcctgaaggatgtcctccgggaacaggaggatgccgtcaatgaaaaaatgatggctctcaaaaagctgattgcggagagctcctacctgcctacgtcctggagaaacggtgaacaccgcagcaccctgacggccggtatggaagaagaggaattccggaatgccaaagcgcaggccatggattttgaaaggagggaaaaggaactggcttcctatgtgcaggaattgcagcgtctgcccgacgacaagttgctggattacgtgatcagttccgacctgctgaatgcggagactgtaggggcggacgctctccgtaagacctatgctgaattttccgacaagctcaaggaaaaggaaaatctgaaatcccagaatatcggcgccaggcatcccaaaatgctggcgctgctggaaacggaaaggattctgggggataagctgaacaaggaattgataggcctgcgttcttccctgaagagcaagctggaaatggttgccgcaagccggaagcactgggaggcgaccgttgcccaaaaggaagaggatcttcagaaacacgtcctgcaggttcctatgtatgaacaggccagccgtgattatgacgctgcgctggaccagcttaaggaactggattcccggtacaaagatgagattgcccgtttgcgcgtaccccgtgaggcaattgaaatgtatcagctgccgacctatcctgctgcgccctacaagccgaatgtgaccattaacctggcggtgggagcgggtgccggtctgttgctgggcatcggattggccttgcttctggaattcatggatacctccgtgaagaccatggaagatgtggaacgggctcttcaggttcccgtcttgggcattattcccaagaatgtgcctattctgcattcttccgatgtcatggggccggatgcggaagcctaccgcattttgcggacgaacatagaattcaataagaaagggctggaagaaatttccctgacctttgtttccgggagcgccggggaagggaagaccaccaccctgtgcaatctggcctatatttgtgcccagggggggtatgccaccctgatgattgacgccgacctgcgccgttccaagcttcaccggtattatgagctggataatgaggtagggctgacttcctacctgctggaagattatcctctggaggaagtcatttttcagacgcccattgaaaacctgtacgtcatgcctgcgggacccactccctttgacccttcgggcgccttgaattcccgcaagtttaatgaattgctgcaggaagtgaagcaacgttttgacattgtgctggtggattcccctcccatcctgggggtcagtgactccgccgtcattgtaagcgaggtggacatgactcttatggttgtccagccccgcaagctgccgctgaaagccctgttgaggcagaagcaggtaatcgagtccgtgggcggcaacctggccggcgtggtgatgaataatgtggacattacgtccgatcaccaatatcagtattacacaacttactattcctattattctgcggatggcgcttcctccggagagaacgcggatgcctcttccatgaagaaggtggaacgttctggaaaggccaaggagctggcagccacccagtcccatgatagtgaagatttgtattaacccattgctccatgaaaaaatatatttgttccatcctttgtcttatgctgggcccggcggggctgggctccgcccagtctccggatgccgtgccgccccagggcaccattgaaatccaggtgcgcggcattcccgccgacgacgctaccgctatttccgggcagtatctgttggacgggaacggaacgatacgcatgccccagctccctccggggcaggatgtgctgcgcgtggtaggcaaaacggcccgccagattgaagacatgctgatggccgcctacaagaaggcggagctgtacacggcccctacgtttttggtgaaggtgcagagttcggatgcgcgactgacggaacacatcgttctggtaagcggcggtgtggctatgaagaagaatgttttgtggcggcgcggcatgacgcttctggaggcgattgtgggcgctagcgacatcacggactggggatcccgctacgtgcaggtgacgcgcggtggaaaaaccgtgacgtatgattatttttccattaaggacagggcgattcccatccagcccaatgaccgcatttttgttcctcagcgcgggatttttgaagggcgcccggcaaaacttcttccctgaggcatttttcccatacccggctttccgcaaggaagccgggtttttttattgggccggttttcatgatgggggaaatatcggaaaaaacgcggatggggaaacggggagcggagtgaaggggcgtgtcgtcagcggtttgtgaaaccgggaggtcttctcatgctcccttcttcaggattcttgccggaaatggatgttttcggggaggccgtatggtggaatcgtggagggaaagaagttgtttcctgaaagcctgcggcatcggaaaggaacgcctggaaaagggggaaaatttgtttccagaccctcttgtttatgggaatggaaggcttgagatccggaaaagattaagggggataagtttcccgatgggcgcgtaggcccttttcacatgattggccggcatggtctccgggcatatattgcggtgaaatgagtttagtatgaatgtaaaaaacagaaaaacaaagaaaaatgttgaacattcttaaactcaatgcatttttggaatctccaaaatatgttagagtttcgtgcggaacggctgcatgaggcttcgtaaatccaatgtgaaaactcgttaatcatgatataccgttttaagaaaacattcatcggcgtgggagggcgtgaatacattagcaatcccaaattgagcttcccggaacatgtcaaaatccgccgccgcggaacgaatcccaggtccggccagccttatacggaggcgggtagcgcatttgtggagacatccgccgtcgcggcacggctctgctgcagcgcttccgccgcgcgccagtatctgcaccgccacggtgtccgtttccgggtggtgcgcaagggtacggggcccctggccctgtactggcggcggctggatgtggagcgggttcttgctggacgggagcccgtgcgccgccgcgtgcctccgtgttatatggatatggccggggctgtcagcatgctgggagtagtgcgcagctatgtttacaggctggtgaaaaaagggctgctgcgtgaatacaggtgcaggatgaaaacagcccgtggactgcgcgtgcgctgcttttaccaccgggaggatctggaacatgttaggctgcacgtgctccagaaaagatgacggaagcggttccggaggatgcgtttttggcttgcgcgcgggccggattgtgtcacgttaagggtatgatagcttttctgcgcggcacggtggcggaatcatatccccagcggttgatcctggatgttcatggggtggggtatgaagtgattgtgcccctgtccacgtttgacaggctgaatccccttcccggcagggagctgacgctgaaaacctacctgcatgtccgggagaacatgcaggtgctgtatggttttgccacggatgcggaaagggatattttcctgctgctgattgaacgtgtttccggaatcggcccggcaacggcgattgccattttgggttccctgtccgtggagcagttcaagcaggcggttgtgggcggagacgtttccggcattgcgcgggccaagggggtgggcaaaaagacagcggaacgcatcgtcctggaactgaaggataaagtgggcctggccgccacgtgggaagcacaggctcagggcgctacttcccaggccgccggggacgcggaattggcgctgattgcgctcgggttcaagcaggtggaatcccgcaaggcgatagccgcccatctgaaggaccatccggatgcggacgtggacgagctgatacgcgccgctttgcgctccatgaattgaaggagcttccggaggaaggtgctcatttttgcaagtttttgattttcatgagagaacatgtccgcctagcggactgttccctgtttgcggaagctggggaacatactgccatgatgggggaacaatagtgttgacggctggttgaaacgtttttaaacttgcagcgtccatggtacttgaataagtccgggactagtaattaatcaaatctgaagccctcaatcttatggccaaatacgctattaacggttttggacgcattggtcgcaacgtactgcgcgccatgtccaaggaagaacgcaacaaggttgttgccatcaatgacctgactcctatcgaaacgatcgcccacctgctcaagtatgactccacgcagggcaagtttgacggtgaaatttccatcgagggtgattatctggtcgttgacggtcacaagatcctcatcaccgtggaacgtgatcccgccaaccttccttggaaggatctgggcgtggacgtcgttctggaatccaccggcctgttcaccaagcgcgacgccgccaagaagcaccttgacgcaggcgccaagaaggttcttatttccgctccctccccggatccggatctgactttcgttctgggcatcaacgacagcgaatacgatcctgccaagcacgacatcgtttccaacgcttcctgcaccaccaactgccttgctccgatggtgaaggtgctggacgacaagttcggcgttgaaaagggcatgatgagcacgattcactcctacacgaacgaccagcgcattctggaccttccgcataaggatccccgccgtgcccgcgccgccgcgatcaacatcattccgacgaccaccggcgccgccaaggccattggtgaagtaatgccgaacctgaagggctccctgaacggcgcttccttccgcgttccgactccgaccggttccctgaccgactttgtggccgtgctcaagaaggatgtgaccgtggaagaagtaaacgccgccatgaaggaagccgctgaaggcccgctgaagggcattctggcttactccgaagaagcgctcgttcttcaggacatcgtttccgacccccactcctgcatctttgactccggcttcacgtatgtggtcggcggcaacctggtgaaggtctgcggctggtacgacaacgaatggggttactccaaccgcgccgcccaggccatgaagaaactgggcgacagcctgggctgcggctgctcctgcggcaagtaagttcttttggacaacgcttgctcttcagttgcacgacaagtcttgccgtccgcctgtttcaactttccggcttttctggccgggtttgccgggcgggcggggatttatccgggagggcagaaatgccctcccttttttattcattgaaccagacaatataaaccgatatggctaaacttactgttcgcgaccttgacgccaagggaaaggaagtcctcatgcgcgtggatttcaacgtccctctcaaggatggggaaattaccaatgacgcccgcattgtggctgctctccccaccatcaagttcctgctgggccagggcgcacgcctcgtcctcacctctcatctgggccgtcccaaaaacgaacccgatcccgctttttccctgaagcccgttgccgcccgcctttccgaattgctcggcaaggacgttaaattcgttcccgccgccattggcccggaagcggaagctgcccgcgccgccatgaaggacggtgatgtggttctgctggaaaatgtccgtttttatcccggagaaaagaagaacgatccggagttcgccaagtccctgctgggcaatgccacgctgttcgtgaacgacgcattcggcacggcccaccgtgcccacgcttccacggaaggcgtgacgcattttgcggaaaagagcgccatgggcttcctgattgaacgtgaactggaatacctggaaggtaagctggaaaacccggaaaaaccctttgtggtgattatgggcggcgccaaggtgtccgacaagattgaagtgctttccaaactgatggagaaggctgatacgttcctgattggcggcgccatggccaatacgtttctggcggctgaagggtatgacctgggcgcttccaagattgaaggggacaagctggatctggctcgggaaattctggcggcggccaaggccaagggcgtgaaattcctgcttcctgcagatgtgcgcgtagccatgaaatttgaagacggcgccgaaaccttctgcacggctcctttcgctgaaggcggcaaggttccggaaggcggcatggccatcgacatcggcgataaagccattgaagagttctccgccatcatcaaggatgccaagaccgttctgtggaacggcccgatgggcgtgtttgaaatggactgctttgccaagggaaccaaggaagtcgcggaagccctggcggattccaccgccatttccatcgtaggcggcggcgattccgtgacggcggccaagaagttcaaggtgcaggataaactttccttctgttccacgggcggcggcgcttccctggaactgctggaaggcaaagttcttcccggtgtgggggccttgaccgacaagtgctgctgcggcaagtaaccgttcatggccgggcggattgttttcgcccggcattcagaatgggcttttttattccccgcacccgttttcgggtgcgggatttttgatttgccggcttccgttgaaaaagcgcgggagctttgcggttccggctttttgaagaaggtgggaatccatgctcatcccgtctttccgttccggaaaggaaggcagtctttttttgggcttgctcttaatatggtccccggtagtctgagcatgatgaaactgttgcattgtttcctggctgtcctttggtggtgttctcctgtaccggctgcggatattcccgatgcggagaatgcggaatatggcgggtatcccgggcggtacatgcttttggattcttcctcgcccgaccggcagagcctgtccactcccgtagcggcctatgtccatgacaatgggatggaagtagctctcattggtgctattcatgtggcggaaccggaatattacgaccggctgaataagctgttccgcaggtacgatgtgctgctttttgaaatgattggaggagagggcctccggcgggaagaggaattgcgccgcaagatagaccgcagcaagccgctgggggggctgactctggaagaggcgcgggaatggaaccggatagtggaatggaggaagaaatgcgagcaggaggaaaagtcttttttaatggggctgctggggggcgcctacaaggagttgagcgacatgctgggactccagacccagcatcagggtattgattattccgcagcccattttgtccatgcggacatgacgctggatgaattccgcaaggcgcaggccagaaagggtgaaagcattgccggcctgatgcttaaatccgtcttgtcctccctggttgagaaaaccgggacgaaccgggccggtgaatttggattgatggcggatttcctggccggcaataaaacggggttgaagaataagctgatggtcatgatggccaatgctcctaatggtctggagaataccgtgattctggaaggccggaatgccaagtgcatggaagtgtttgaccgttggagcggcaagggtgtgcgcagaataggcgtcttttacggagcggcgcatcttcccggcctgcacggtgctcttttggaacgcggctaccgtctccgggaggtgcgctggcttccggcgtggagtaccagggagaagggtgcggacgggcagcgcggagagggctgagtttttttactcttttttcgagacgggaggtgtagcggcggatgaacatggttttccgccgctccgcctttaaagagggaagaagaggggggcgttttttccctgcctggggcaggatgccgttctctagggggcaggatgccgcgttccggagggaaccatgcggacgattcctccgcctttgatgcgcatggtgaaggaaagggcattttcggaggtgactttccgggtttccacgctccatccgtcatttttttctgccagatcccggagaatggtggcttggtatgccgtgtttttgtccaggaaattcaaaggaatggaaacggtgcgttccctgccgtctccgttcatcagagcaatgtaccactggtttcctgaccgccgggcgaaggcggcgcattccccaatggcagacggcggcaggacgatggtttcctcccatacggaagggatgttccggacaacttcccgttcaggggaatccttcgggaaagcagcttccatgtccgcagggttggagacccagtgaagaatgggggacgtataaatgatattggccgccatttggagggtccaggaagagccgcgcagcttggggccgtggccaaaatagcctcccgtgaaatcggcgtggccggagaccaggcgggtaaagggcagcgcgcagtagtgctgcccgccaatggcggcccagatgttctgttctccgccgtaaatgccttcccggctcatttcgtgcggccaggaacgttcctcccccgtgggggtattggctccgtggaagttgaccataagcttgtttttcgccaggttttccgctacggcgtcgtagaagtccaggcgttcctgagaggcggagtccatgaagtctatcttgattcccctgattcccgttttggagagtgagctgaaaaagcggcgcatattttcccagtcattggcggggttgttgacatctgaccatcgcacccatacccagatgcctacgtttttgccggcggcgtagctggccagtttggccagcttgtccatgctttccggaagtgatcggccccattttttccacccttcgtcaacgagatgatattcccatccgaattcggcagccatatcgacaaaggcatattggtcgttttccaggacattcccgcggtcccaccaggtccaggtggaacggcccggcttgatccaaggggctttggagccttccggaaaaagattcctgtccggttccggagccagggaagggatgacgtcgttccggaccagtccgttcaggtcgtcattcaccaggatgacgcgccagggcatttccgaggatgagagggcggaaaagccgccgggatcctggaaatataccgcacggcatgctccatcctggagggaaaatttaatgccgctccatttcctgttgaagttggctgcttcctgtatgagcgcgacgcctccgtccggcagttccgccgtaatcggcatggtgcggacacagctgcggggattgccgggatcttttttgaaatccgttattctggaaggagaccagaccccctcgcaggggcccagggcggaggaggcgtcctgggtccacagaacggttttttccggaaaggcgaaggaggttttttcttcactgatattcagcgagggcgctttcttcacctcttccgtccactcatagcggaaggcgaccccgttgttgaagacacgggcccggagccggagggaggagttcttcccggaaaccacgtattcattgaagcagacggaagaggtggggtatttgccccgcgtctcgaaggtgtcgcgaacgttatccttcactttttccacattccatcccgtgatgcctccggcgaggttttttccgttcacgacgacgcccagcccggatggttccagaatcgttttgccgccttttttcagagaatgggcggcctggctgcccgcgtggagcctccaggacagccgcccgtccggagattgcagggatgcgtgcgtttccgccgcctgtccggcgccggtcaggaggcatcctgccgtactgctgagcataatgagtgattttacaagcatatctttatcagaatacgtccgtctttgttcatttattgcaaaacagcgaagcggaaattggaacatccatgttccgaaggagggaaaatgccgttccattggaggcatccgggcaatttccggaataaaaagggaaagccttttttcttcccacatgaatttgtagcggtatgccgttttttcgtgaaggccggggatcatttatgaagaaaaaataatagatatcttatgttcctgtgcagatagttgcaggaaaataccggattggcagggagcaaaagaataatctttacaaaataataggaagcaatagaataaagcgcattgcaaatataaggatggagcgtagcggtttaaatagtgatcctgttttttcggaccaggatgagcattccgataatgtttctgtacgcagctcctccaaattacttcctcccccttcctggaacgagtcttccgtttattccaaggaactcccggcgggagcaactttggaacattataaaatcctgaaggtgctgggcagcggagggtttggcattacctacctggtgcgggacaccatgctgaagagaaaagtagttcttaaagaaaactttccttcttcttatgcttaccgggatccgtttacagggcgcgtgatacccaacaatgaacacgatgccgagtctttccagtggaccctttccaactttttaaatgaggcccgtgttcttgcacaactggattcgcccggtatcgtgcgggttctttccgtgtttgagtgtaacggaacggcttatttttccatggattacgttcagggtcttcccatggattatctgggagagcagcagcttcttgcggggaactgttattccgaggccaagttgaaggggctgctggtgcacatcctccagattttggattaccttcataaaaaaggcatctgccacagggatatcaaaccgggaaatatcctgcttacacaggaaggggctcccgtcctcattgatttcggcgcgtcgcgccgtatcgagagcaaccacacccagaccgttctggcgacacgtggtttttcttctccggagcaggcgctgggcagaaaagatatggggccctggagcgacctttattccctgggtgctacattttattccctgctgaagggctttgcgccgcccagaggggaggaacggctgatcaacgacaccatacagccgctggccgcatcctcttcgttgtcttcccattattcgaaaaattttctgaaaaccatcgacaaggccctttctccgcgtgtggaagaccgttatgcttccgcagaagcgtggatgaaggatctgagggttgagggaggcgccgtttcaaccattcagttctcccccgaggagttcaaatcagcccgtaagcgttttttcaatttgtttgccttatcctcttcccgcattatgtcggaagggcaggaacatttgaggacgagtcggaagatagcgtttgggatgattattgtcctgggaattataggcgcgcttctgggatattctattcacggggggaacagaacggagaatgaagatgcgttagggctgcgttttcccagtgtgatgtccactcccattccccagattatttcagattcaagggatgtgtcattgttaagttccatggatcattttgacgtcaggctggatagcccgtctttatcgcgtcatgctctgccgtccgtgctgcccgaccgtttttcacttgcatgcgttcatttaagagtgcttcaggaagacaagatgtgcccgcccctgtatctgaccatacgtgatgagcaggggaagctggtttcccggtcatttaacggtttttccttcaccttgattgaaagtccggtgcttacaggattccgttttgtggatcttcctgctctgaaagtagatgccccttacagattcagttttgagaccaaggataatgttccccatcctttgaaggtggtttcttcccagattacgacgctggagagcgggaaagtcctgaagccccatttcaaattcatctgcgcggcgtatgatcccggtgtgaaagcttctctggacagcccggagaacagcaaactccgggaactgcttatcgcttcctggaaaaggaaccgtacggaaattgattccatcgtgctgacggagcgggagaaggttcagttgcggaaattcgccagggcggggtatccttccgcgcagtataaaatagcccgtcttattttcgaacgggatggaagatacggggaagaaggtggcgcctggctttataaggcggccatgggcggctttattgtcgcccagagggatttggcgtttcttcttgtaggcggcaaggagtttttcccggatattcttcagtgtccggtcagcctgtcccagaactattcccaggcggttgatttgctgttgatgtcttttacggcgcaggatccttccgccctgtacatgctgggcattttgtattcccaggggtggggggtggattattccgcagagatggtcatgaggctgtccaaactgttggccggttccggttatgatttgtcgcggctcactttgtccgcccccattttagcccattgggagcttctggggcagcaggatggcgcttatacgcggatgtgctgttccattccggacaggaagatgaagcaattttcaggtgttcgtctggtgcggacttccaaagaggggggaagtctttttattgacaaggtaattctgttcagggacgggcaggaagttatgtcccgttctttccgttcggctcttacccaggaatctcccgttctggaggtgtccatgaatatggaggattacgcagagaatgtggagaatttcgagtggtcaatagaagtgatcatggctccggccaacacatgcggcatcatggaaatgatggaaaaaaaggagctttccaacgataaagagaagcggatttgatggaaagctgccggagcggtctggcggatacgcggtttcgtattcctgccgcaaccccgttcccggcaatggaaaggggcaagaactgttttcccatgggtgaattcagccacgggatgaccgcagcggatttaaatgtttttcagcatgtccagcgtttcccggagtttgtccgcgggagcggcgcttgccagccgcgggaatttgttggacaacaggataaaatccccgtttctggtgagcatcaggcgctgtccgctgatttccaccatggagatgttggcatgggatgccaggattttgattttgtgggagtccagcaggtggcgcaccgtttccggcgcggggccgaagcggtcttcccaggcgcggagcagattgtccgcttccttaagggttcggacggcggccagatccttgtaggcggagatgcgcagggccgcgtcactgatgtattccctgggaaggaaggctcccagatagtccttgcgggattttgcggcgaactgcgtttcgctgttgatgatgaagtccgttcttagagccgcatccggacggggggccgtgcgtttgccctgcatctgggcgatggattgctggagaagctggcaatacaggtcaaagcctatggcggcgatgtggccgctctgctgggttcccagcaggttgcccgcaccgcgtatttccaggtccctcatggcaattttgaagccggaacccagttccgtatactgtttgatggcggagacgcgtttgcgggcgtctcccgtggtggcggcggatctggggagcatgaggtaggcgtaggcccggtgacccgcacggcccacgcggccgcggagctggtaaaggtccgccaggccgaagcggtccgcgcggtcaatgatgatggtgttggcgttcggaatgtcgatgccggattcgatgatggtggtggccagcaggatgtccgctttcccctgcacgaaggtgcgcatgaccttttccagttcttctttaggcatttggccgtggccgatgacgatgcgggccttgggcaccagggcctggatgcggtcccggaacagttcgatggttttcacgcggttgtgcagcaggaaaatctgtcctccgcgctccagctcgcgttccatggcctttttcatgatgcgttcgtcgtaagggcacacgcttgtctggacgggctgccggttgacgggcggggtttcaatggagctcatgtcacgtgctcccatcagggcaatgtacagggtgcggggaatgggcgtggcggacagcgtcagcacgtcaattcccttgaagcgttccttgaatttttccttgtgcctgacgccgaagcgctgttcctcgtcaatgactaccaggcccagatttttcatggatacgtcatcggaaatgagccggtgcgtgcctatgacgatgtccacggctcccgttctgagcccttccagcgtggagcggatgttcgccgcgctgctgaagcggctgagcatttcaatacgtacggggtattcgctcatgcgttccttgaacgtgcggaaatgctgttccgccaatacggtggtggggaccagcacggccgcctggcggcctcccgtcacgcatttgaaggcggcgcggatggcaacttccgtttttccgaagcccacgtctccgcagatcaggcggtccatggggcgggtggattccatgtccgctttcgtctgggcgatggcgcggagctggtcctgggtttcccggaagggaaaggagctttcaaattcccacatccatttgctgtccggggggtggctgtagccttttcctgtctggcgttccgcctggacattgaggagctgggcggcgtaatccgccacggatcgttctgcggattttttggcgcgctgccatttggagtcccccagtttgttgagttccggcgttttgcttcccaagcctatgtatcgtgagaccaggtgagcctggctgagggggacgtgcaggaccgtgttgtcccggtagaggatgttcatttcctcgtctccggagtcaggggaggcggaaatgttgatgaatttgccgatgccgtagctggtatgcaccaccagatcaccgggattgatgtctttcagggatgcctgcgcgcgtgccttgcgcgccttgtcttcccggctggcgcggcggcgcgccgtagcggactggtacctgccgaacagttccgaggaagagaggacgaccgttttcgcttccgggatgctgaaccctgccggaagttctccacgaagaggggtgatggacagcagagcgggtgttccggcgcagatgtcccggaaacgttcttcctccccttcattggggaagaacatgctgacattccatttccggtccagccattcccggatttggcgttccgccagttcacggcgcatttcctgcatcacgaagtcccccgcctcaaagctgcccaagggattgtcatggatggcaagggagaagttttcttcccccgccgcattttccgggggggaggtgaggatgcatacgttcccccgttccttgcagaaaggggcggtaataaccaggtcgcccggtttgatccagtcccgcaaggtttccgcgccctcggcttccgtcagtatgaggttgacgtgttccgccttgcggaaggaaatctgggaatccacatcaaattcccggatggattcaatttcatcgtcaaaaaactccaggcgcacggggtgggaggactggagaggaaagacatccaggatgccgccgcgtcgggaccattgcccgcgggaaatgacctgtggaacaccttcaaatcccgcttccccaaactgccgtatcaagtcgtccggtgcgtgcgtctcccccgttttcagggtgatcccctggttttgcatgccgtcgggggacggaacctcatcgttcaggctgccttccgtcaaaatgatggtttggccgcccgtgcggctggaagagatgcggtgaaggatattcagacgttccgcggcgagctccgggtcccccatttcctcccccagggccacctctttttccggaatgaagaggaggtggcgcactccccaggtttccagttgggctgcaagggcttcctgagcccgcaaatggggcgcgaccacccaggcccgggcggtatccggaagggttctgatacacagggccgctacaaacggcaccccgggcagggaagtatggtcgaaaaccgcctgttcctccgtgcccagtttcgccagttcccggtgaaagggggcggtacgggctaccctgtccatcagggcggatatggaagcttcttctgccatgcgtgtctgtgaatccctgttgagggaagtgtgccgcctttccctcccgtgtcaacggtttttcagggcacaaaccgcccttcgttttccgtcgggggattgtttccacggcacgcgcggcacagttcaggaagaggaacggaagcggattttaacgcttgccttgcgccatttctgttcaatttctttggccagttcttcatagctccgtccgtcaaggaggagtttctgagcttccttttcactggttccggattgaatggctttcatgtaattcttgatgcgccgggcatcgcccttgccgtccatgtggtaaaaatagtaggccatcagggcggccaggccgtagttcaggttggcgttttctcccgtgaactgggaatagggcatgttcatgtaagcttccaggccgggtgcctcaaagtcatccccaagggcccgtccccccgtattttttttgccgtattccgtcacgcgggagacaatgtgggatcggttggctccaaagttgaagcggcctccggcatagggcgtcatgcccatgtattccgcggagccttcacaaaaccagctggcctgcttggcctgcgaagacatgagctggtgcgtcagttcatggatgagggtggaagcgtccttgtcacggtcaatgacgtatgtgcttcccatggttttgactcccagggaatcgaacggaaccagaattcttccgcggtcccctggccgcgttgtccccaggaagatgcccgccgtgccttcgcgtccgccgttttccagataggtgctgaatttttcatacaggtaggcggggaatttggcggaatcgtcatgggcaggggagtttcctataggaagggttttgttggccaagtgggtggcctcaaagaggaggcccaggcgcttgatcatgccggtgcccagcttggcgtcgcagatgaagcggaaatggggtgtttcataaatatattctcccggttcctccttgatggtttccaccttgaaattgtccgggcatttgacgctcctgggccacggcaggtggtaattgtccgccgtattggtggggagtgccctacctttttcctgttccgcgatgaaatccctgtcttcccgggagagcagggagaggggaatggagacggtttggccgccggaacgtttcagcacggctttctggccgtccagcctgatgaatgctgcttccagttttttcccttggaggttggtccaggtgcgcccctgtgcaaggggggtaaggaaaagggcgaacagagttcccgccgccaggcagaggcgtgcgggctttttcatcaggggtaagacgggaggcatgaacataattgcgtttaatgtttgggacgcggcagcatcaggagcagcagcccgcagaacagcatcaggcatcctgccgccgccagggtggtggtcagcggaacgccctgatccttgaaccatcccccaaagaaggagatgagggcgcccacgccggcggatgtgaggttgaggaggccatagccggttgcggaataacgctcgtcgatatgggagcgtagcacaggcatgagggtggcgtccagtgatccctgcgccagcccctgcgtggcgaccagacccagcatgagcacgagcgggacggtgatgtcccagccgaagatgccgggcagcagcgccagaaccaccaatgggccggatatggtgaaggtgatgcccggcaccagggcgcgggcgcgggcgttgcgcctgtaccacatgtccgccaggatggcgcctcccagcacggcgacgtatttggccacggagctccacagggtggcggcggggcccgcttccgcggaggagagctggtatttgtcctgaagcagggtgggataccaggtgagaaggaaccagttcccggctccggcaaaggccactacggccagcagcatccacatggggcgtccgctcagcaggctggaaaggacggctccggtggaaagtttggaagagggttccttgatggcctgttcgtcattgtccacattgagcagcaccgttttttcctccggtacggacggtttttttgcctgggccgtatccgccggggctttggacggatctttcaggaacaggatgaggatgacggcgtacgccacgccgatgaggccgaacagggcgaatgtcatgcgccatcccgtccatgaagccatggtggcaccgaagccggcgacggccatgcctacatagatgccgctcatgtgcaggcccgtagcgatggagcgcgtgctgccgcggtggtagtccgtaatcagggccagggcggcggggatgtagaatgcctcgctgatgcccatggctccgcgcgcaatgagcagggaagtgtaatcttccgcatggccggtccaccatgtgaccacggaccagacgacgagagagcagaggatcatcagccggcggctgtaacggtccgccagaaagccgcccaccgggctgagtagggcgtaaatcagcaggaaaacggaggtgaccatgccgaactgggcttccgtctgcggaatgtcccgtacgatgggttcatgcagggcggaaaggagctggcggtcaaaatagttcagcatgaccacaaaccacaggacaatgacggctacccaggcccacaggcccggcttggtgttcgggtccgtgacagaggcaacatttttaacgccgttgcgcacggcggagacgatgatgatcgccaggacgatgatggtcagaatgagaacggcgtaatcaaccgtgctcatttcaaagtggtaacctgcggaggcggaggcgtttacgggagtacggacgcccggggccgtttccccgctgatggtcatgatttcagagcccctgacaacggcgggaaccgtggcgatgcccacgggccattccccttggcgcgtccatgtgtttccgatgacgtcatagaccaggatatcccgggactgcaccacgggcctggacgggtccggcgagttgccgcgcttgtctcctccgatcaggagaatggagttttcccgcaccggggcgggacccgcggcggcggctacgggcattcccggtccggcaagctgctgcctgccggaggagccccatttggaagggtccttggacgtcatgtcgtagccgatcatgtcggaaagatacgtcctagaggtttctccggagttatccctggacagggaacagccgcctatgatgaacagggtgctgtcgcagacggcggcggtggagagaatgcgcccctctccgggaaaagggggaagggaaacccatttcattttatccgtgtccggcgtggtgtccagcatgtagatggtattgagtgcggtttccggctgctcccggtctctgccgccgatgacgaacaatttgttcccgtgggcggcgcaggaggcttccgttacggggacgggaaggggaggaagcttttctacggagccgtccgttttaatcagcagggcgtctttcaggatgccctgagcattgtggcctccggccacagccagccccttgcccacgctggcaaaggcggcgtaacccagcgggacgggcaatgttcccgccttgctccactggccgttgcgaagcttgaaaatatcctggtagtaggttttggggccgcgttcctccggagttgaggcgcccggcgcggcctgggggaagttggcgccccctgcggcgatgacggactggctgccgtcgtcttccgtgacggttccggcaaccatgccggcgcggcctgccgggtccggaaggtcgggaacagttccggacgtccggacatccacggaaaaggaggcgtcagcggacggagccgcgataagaagcagggctgccagagcggagccacaagccttggaaattcgggtaagggtgcgtgtcatgtgcatatgttgagaggtttaattggattccggtcaaatcaggggagggagatgctccacacttcaggagagcgcctgccgggtttgagctctccgttcacggccgcgaaacggccctgccacgcgcaacacggaaggacagccctgggcgcggcgatggggcctgcgtcgtgccatgtcatgtctgctgtgtccaggcacagggattggttattgaagccgggattagtttggggagtgtattttttcccggagccgtcatcccccccaagcaggtaaatgacgccgtttccggaaaccggggccggggtgggggctgcggcgatggcgtaaggcatgtccggcaggcgcgtccatccgtgttccggagtatagctccaggcttccttcagcagttcccggacctgttggccgtcctgttcccgcaggccgatgccgccgagcacgtacagggctccgtctgttgcggccatctgatgcaggaagcggccgcggcccggcagcggggcctgttccagccatccctgttccgtccggcgtgtgtccagcatgaagacccggttggtgcagtcctgctcgccggggcgttcgcaccctcctgtaagatagactttcccgtccaagacggcagccgccgtatatgccagggcgatggggagggaagggaaaggatgcgtggtgacagttccctccgcgaggttcagcaggtaaacgtctttccggtgcccttccttgccgcagccgccgatgcacagcaggccttccctgatgctggcggaggcgccgtatgcataaggcacgggcaatgtgccggcctctttccattcgttttcccccggagagagcgtaaagatacggtccgtccacgttttggcccctccttcaagcatgggcttttccgggaaattggtacctcctgcacaaatcattatttctccgcaggtccctgcgtacatgccgacgaagccttccggatcgggaagggcgggtaaaggtgtccaggatgaagaatagcggctcataatacgtgtaaatgactcgccatatactagctaaaaaccggcggctgcgccagtattaacctctggtcctatttttttgaataaattcctttccttgcgcctcttaccaacgtagaagaggttaatcatatgaaaacaggaacccgtttgttgattttatgcctcctggctcctgccgccctggcggaaaatatgtccctgcggtccggcagggtgctgaaagacgccgttgtggtgtcttccggagatgattttgtcaatatccagtacacggacggggtggccaaggtttcctataaagatttgacggatgcccagcaaagggattacaggatgacgccggatgaagtgaaggccaggctggaccagcgaaggatggaggaagcggcgcgcagaaagaaggcggaagaagccaggaaggcggccgatgaagaagccaggaagatccgggagtccctgtctgaggcggagcggcatccccgctatctggaaggggcggatatttcccgcatgtttttgctgatgggggaacttaccaaggtggaggcggaggttatggctctgcagtggaatgccctggaagcggaccgtgtgggtttgccggaagacgcccgcgttttccgcgcaagggcggcagcctatcaggagcagataagcgccatccgtaaaaaaagggaaaccgcggaacagtattggcaggatttggagaagaaatacctggccttgaaagacggtacccagaagaagattgcagatttgaataagcaggtttcccaattgcagggggaagtgagggaggtggccagccagccgagaacggaacgcatcattgtccctccgattatcaggacgtggaattacccgccgccgcctgtctttatccggccccagccgccccctccccgtcccgtgcctccgcgtccgatgcctttgcccgtaaagccgagtttgtacagaagttaaagatgctccggagcattcccttttctgtccatgggcctgtgccgtttactggaaaaagggactgacggaagggaatacgggaaacaggccgcccgtgcggctgccgccatggcctgccggaacattcctttgccgcggagggaaagcatcagattccgggcagggggaacagtttcatgcggcccccctggaaggaggccagatgcctgaatcctgcctgccgggccagttccccggcccgcttgaaatcccgccctacatcctccggcctgtgggcgtctgaactgatggtgaggggaattcccgcctccgccgccattttcaggaattgcccgtccggatattgttccccgcacttgttgtgccaaccggctgtgttaagttccaggcaggctccggtttcccgaatggcttccagcgacggttcataataacggcgcaggtctccagaagggcggaagccgaattttttaatcaggtccgcgtgccccatgatgtggaacattccggaggctgccatgttccggaagcgttcccaatactgttcccatgcgtcctccacatccgtccggtgccagaaatccatcctgtggggattgtcgaattcttccttttcccccagataatggacggaaccgatcaggtaatcccatgcgtgcaggccctgcaggtgctctatccatggttcgatgccgggaaaccagtcgcattccagagcggaacggaccgtcagtccgtgcagcgcggcgcattcacgggcttccgtgagccagtccaggtaggccggcatgtccgcctgcttcatgcgccagtcgtcaaaaggttccccaggcatcggggcatggtctgaaatgccgtattcccggagtccggctcggacggctgcctgcacatattcctgcggagtgccggaggcgtgcaggcacaggggggtatgggtatggtaatcgcagtacatggaggggaatgcccatgctagcatggcggagcggacggttcaacccggagggatgtctttgttcattatttgccgtctttgactttatgagttgattttatggacaggattttttagagttgcgttaaataggacacgtgacatatgagtgactggcaaggcttttccccgctgaatgattttacagggccgctcctggataacctgaagcgccaccccaagcgcattgtttttccggaaggggaggatgtccgcgtgctgcgcgtatcccagcgctttgtggaagagcaggccggcgcgcctatcctgctggggaggagggaagtcatcacgagaatggcggaaatgaacggaatttccctgaaattcgtccgtatcattgaaccggaaaaaagctcggatcttcagatgttctgcgaccgttatgaacgggcggagcagatgttcggcaacgggttgcctatgaatacccgtgaaattgtttccgaaccggttcattttgccgccatgatggtgctctacggccaggcggacgccattgtggccgggaacatgaaaagggtggcttccgttttccgcgcagtaaacaagtacaggcaggatcccgttcccaccaagcccctgtttgccatttccattgtgctcgttcccgaattttccaagaaattcggcggccgcggcgtctattttctggcggataccggggtaaaccctgaacccacggtggaaaatatggcctattttgccgtagagacggccaaaatggcccgccacatgctgggtaaaagcgttcgcgtcgccatgctgagcgcgtccacttcgggctccgttccggaactggctgcggaccgcaccagggccgctgcggcgctggcgaagagcatggtgcagaaggattgcctgaacaatgaaatctccatagagggggaaatccagattgatgccgctctgtcgtcagattcctacagcgtgcgcgtgcaccgcaactccatgcttcagccaagtgaggtttgggtcttcccgactctggatgctgcggatatctccaaaaaactgttgtgcatgatgccgtccgtatacaactatggccttattctgggcggtctgctcttcccgattgcccagctgccgcggctgacagatgaagacaggatgttcggtactgcgctggtggtggggaatgaagccattaaattccacctgttgtatccgcagggggttgctccgctttattgaccgggcgcggcgtgtccgtgaccagcaggcgcttttccttgcgtacggccagttttccgccgggcagggaagttcgggaagggccgtccgtattcaggatgtccattacccggagtacggcgtcttccgtcaggtccggaatatgttgctggcgcaggtaatcatgcacggcgcattgtctcagctccgcaggaagcaggttgattttcggcaggaacaggcgcccctggggatctgtcaggttcatggagtccagcgcctgggaaagcgccgtgcggatttgattttccaggcggcaggcacgtgaaaagggaaggctggtgtccctttggaacagcgcattcaatttgggaataatctcatggcgcagggcgttcctggtatattcggcagactggttgctggaatcttccctccatggaatatggcgatgctccagataggaggtgatatcctcccgggaaaaatccagcatggggcgtacgacggtcaatccgttggcccaggtggagacggggaacataccgtgaatgccggaggcaccgcggcagaggtgaagaagggccgtttcctgctggtcgttccggtggtgggccagagccacgagagcccccgggtaaccggcggcccatttcagaaacgaggcctgcctggcttccctggccgcttcttcaatggctattccgcgggtatgggccatactgcggacattgacgcgttcccggacacagggaatacccagggaggcggcgtaacggagcacaaacatttcctcttcctccgcttccggacgcagctggtgatttacatggcatgcaaccagattgcatcccggcatgccggacagcagggaaagcaaagccatggagtccctccccccgctgattccggcaaggacggggcggccggagcggaggagttccgcggactggctgtcaaaatggtccggtgtcaacatggtgctgctgcgagtgaatcaggaaaaagagatcaaaggaagcctgcaaataaaaaccccgttttccgggaaggaaacggggttggaaaattgctgaaggcagttcttacttgttgagcttgggcttgcctccgctgcggcggacggtgccgaagcgcttctggaatttgtcgatgcggccttccgtgtccacaaactggttcttgccggtgaagaacgggtgggaatcagaggtgataccgcaggaaaccacgaaatgttcaactccgtcaataacttccgtcttgggagaacgaacagtggaacgggtgatgaagcggcgtccggtggtgatgtcaacaaaaacgaccggattatactgggggtgaatatctttcttcatggtgatgtattgcgtttccgacgcaaggggaacgcaagtataaatatgtttcattgcatgtcaagcatccccgcgtaaaaataaggaagtttgtggatgacggttcgggagcttgcggaaggaacggttgtggagatgatatgacggaaaaatggagcaggtgttgaagaggcccccctggtgggcgtggttttccctgatgggattggaaatcccttctgccgccattgcctgggcttttgccgtcagccagtcccatctggtggtagtttcctccccctggctgtatcaattcctgtttgtggctgtctggtgcgtcaatatgctggaccgggtgctgaaaatattccggggcggttccgctgtctacacggatgaatgcctgctttttgccaaaaagcattgtttcgttatctccctgctcattatggtggcggccgtgacggggctttggatcatgtttttccaattgggtgtggttatttttcaatttgcctttctgcctggcgtctgcagtctgctctttctctatttctcttccaaccctcatcagaaagggagcctgtcttccggattcgtcatgggggcgttttttgccgccgtttccttcgctacgggtgccggaataccggcctacttttacgggacggtaggcggcggctggggaggccagctttccgaacccacctggtatctggtagcgctggtcatcctctgcatgttcagccgcaaacggtggagtgaagaagaggatgaggacgggcaggattccgccgaccgcgacatggtatccctggtatggatgggggtgatagtcatttacgttgtattctgtctggccgccgccgccagggaatataccggggatgcgtggatttattatgggctggcaatggcgggggcattcatgtttgtgctggacaggctgaagatgaacatgcctcccctcctcctgcacacgctatcctgggcggcactgattttcccattgctgttgagcggtattctggcgcaggcttcctcctgattggctgggcggattcctgctatggagcgcggcaaaatacagggaagttgaaaaaataatattttgtggttgcaatattgggaagaggatgatagattctgccccgcaagcacgttctgcgtgcaggcaagtggctcggtagctcagtcggtagagcaggggattgaaaatccccgtgtcggcggttcgatcccgtcccgagccaccattttttctcccaatttctaatccctcctttttatacgggaagtagctcagcctggtggagcgcctgctttgggagcaggatgtcgcaggttcgaatcctgtcttcccgaccattttaaaacctgtggatcaaatgatttacgggttttgttttttgagctgttccctggtggttgtccgtaaaataggtggagtggaagcggggcatgcctggaaagatgaaaaacacccctgttgcggcggggcggccgaacctgcagccagttaaaaaagccggaaatcttttgtgtccgaagcaacgcggacagaaaggcgatgcaaagttcttgtaacacccgcgtgctgacgaaagcctggtcccggcggcccggattttttctgacggcggggcggatgaataagatttgctaatgtgccaggctgaaaaacggtgtaaagaaaaccgccgcggggtgggaagtgcggcggaatggagaaaatgatagatgatagaaatagttttatttcttttttagtatataatattcggccaggacgccctgattgactgtgccttctttgtctgacagcattactttgcttccatcgagtattttataataagatttttcattggaagaggattgggccagttccatcaggtggccattgatgaaatgataagagccttttgattcgaaaatagcgtctttttctcctatgtattcgcttctcaacacataagtgttatcgttgtttaatgttaacgccgtcctgattccttcacaatcggcagcaggaagaattccttcataagtgccgtaaaaatttaaattctccaactgtttttctgtttttgtttcgccgctctcaattcgagaatgatgattttggggggaatcacagccggttatggcaattaaacatgcggtccataaaaaatttattttcatgacaagtttttttcagctggtggtttgtaacgtgcgatgcttgatccaatggggcagggaagggagtacgttcgtttcctgtttttccggttttgccgtaatatgatgaaagtctacggaaggggcaagatatttttttttcatggagcccgcgagtattgatgaatgccggattaagtaatttatcccgtttttattcaactttgccggaagaagagttttccaaccgggattgagtgttttgcagtccgttttgcgaagatgttgttttttttgaggagagccgagtgtctggggaagccccctctttgcagatattgccgagaaggctggattttttgcttgagattaggaagaaggcttgcagagtggcttgatgaggcccggccgacaaaagacattttccgtttcctggctggcggggttgaggtggtcgtttggcgggtatgtaacgggaacacttctggcggcgggtgcgggggcgctggattttcccttgctggcgcaggtgatgcttttggccgcggcggtttgttttgccgcctctcttgtttgtgcgggagcgtgtttccggggcagcaagattgcccggtggtacttgcttcttgtcctcgtgatgattatggttgcgtttctgtttgggaatggaggcggttaattagtcatttgtatatcttttgattgaccgcgtgcgcgcgtatgtatactttccggtcatgctccttcgattcttatcgagtctcttttttgcgtccggcattgttttgaccgctcaggcgaatacccagccttatccggattccgattcttctgacggatacgataccggtttttatgcagaggcttattccggcggctacgacagtgctccggctccggcgggggaatccgcctccaggcctgttttccccacgcagtcctattttgaattgcttggccccatggattccagaaacgggcgcggaagtgtggatatccagaattggatgacggatttgaatttgtgcaggatgtccagcggttcctggaatttttcttctacggcggccttgcgtctgagctggtttaatggaaaaggagcggatgagatggatgtggaccggctgtacacgatttggctgaatgtgaacgcctcctatgccatcacggggaagacgcgcctggttttcggtgtgacgccccagatttccacggatttcgatacatggacgagccataatattttcttgggaggccatgttcttctggcaggccccttgaacggccggttcagctatggaatcggcatcggctgttatccgcagcttggggattatcctttcctgccccttatccagtttaaatgggaagcttcccgcaattggacgcttcagctggaaggggcccgcctttcctatatcaacaaggtgagcgatgggttgaagtggggacccttcgtttccgtggtgtccggcacatggacgattcaccatgaccgccgcgtccgccagtttgcatggatttccggcgtcgccggcataggcgccgatgtggggttgggtcactggggcagcgtgcgccctaggctggtggcggatgtcggtttttccttcgggaattccggcactatcaagaccagcaacggaagccatgatttggaaaagtaccactatgaccccggtttttatttgcgtgcggggctgctatttgagttttgaccggccaacaggattagcgaatacatgacaaaggcctccggtgcgttgagtgtaccggaggccttttacatatggggacgtttgaagccgggacggttcccggaggcggctaggcttcttcaacggagggtctgcccacggagtggtattcaaatcctacggcccggaggtttgccggggagaggatgtttcttccgtcaaaaatgatgcggttgcgcatgacaccggcgagtttctgcagatccgcattcgcatattcgctccattccgtggcgatgaccagaacttccgcatcccgggcgcattcgtacatgtcttccaccagtttgacccccatagggttcagaatgggggccgccgtgtgcatggctttggggtccgtagcggtgacaatggctccttccccgcagagtttttcacatagtttcagggcgatggactcccggacgtcgtccgtgttctgtttgaaggcaaggccccaaacggctatctttttgtccttgaggacccacaggcggtcccgaattctgtccaggaagtggatatgctgggtgtcattgatgtgttccacttcctccaacagggtgaagggaatgcccagcgtgcggctgatattgatgaaggctttgacgtctttcgggaagcaggacccgccgtagcccagccccgcgttgaggaagtggcgtgagatgcgtttgtccatgccgatgccttccgccaccagttccacgtctgcgcccgttttttcacagaccttggcgacagcgttaatgtaggaaattttcagagccaggaaggagttggctgcgtgcttgatgagttccgcggagttgacgtccgtttccagaataggggcatgaatgggctggtaaacgcgcttgatgacgttcatggcctgttccgagttggctccaatgacaatgcggtcggggtgcagcaggtcgtccacggcgcatccttccctcaggaattctggattggagacaatgtcgaactgaacattcggccccgcatagtgcttgatggtctggctgactttttccccggttttgacgggtacggtggatttgtccacaatgaccttgtatcccatttctggttggagcgcctgggcgatttccctggccactttttcaatgtaggtcaggtccacggagccatccgtattgggcggcgtgggcacggcgatgaagatgacttcgctttccgcgatggaagcggcgatggaaggggaaaattccagccgccccacggctacgttttttttcacgagctcttccagcttgggctcgtaaatggggatggccccggattgaagagtacgtattttttccgtattattatccacgcaaatgacgtgatggcccatttcggcaaaacaggtgcctgtggtcagccccacgtaaccactgccgataattgttaaattcatagtgttagcgtaaatattggtaaaaacttaactgtatggaaaagtaagagcagtcaacccctgagcattatgggatagggaattttttctgtcaaaataaaaagttcctgattgagcgcctcctttccttgtggtataaccgtgaccagacaggaaaatatctgtttattttaatttgaacgttatgaaaacacctatcaccgttaccgttacaggagccgcttaccaaattgcctattcccttctgttccgtattgcctccggcagcatgctggggccggatcagccgatcaacctgcgcctgctggaaattcccccggccatgaatgctctggaaggggtggtgatggagttgcgtgacgccgcgttcccgctggttaatgaaattgtcccgaccagcgatcctgatgaagcgttcgccggcgccaactggtgcctgctggtaggctccgttccccgcaaggccggtatggaacgcaaggacctgctggatatcaacggcaaggtgttcatcggccaggggcaggccattgcccgcagcgccgccaaggatgtgcgtgtgctggtggtcggcaacccctgcaatacgaatgcccttattgccatgcacaatgcgagcggcgttccctccgaccgcttttttgccatgacccgcctggatgaaaaccgtgccaagagccagcttgcggaaaaggctggcgtccatgtgacggaagtgaccaacatggccatctggggcaatcattcctccacccagtaccctgatttcaccaacgccaggattggcggaaagcctgtgacggaagtcatcaaggatacggaatggcttaagggcgatttcattaccaccgtgcagcagcgcggtgccgccattatcaaggcacgcggcgcttcttccgccgcttccgccgcttccgcagccgtggataccgtccgcagcctggctacccagactccggaaggcgactggtattccgtggccgtttgctccgacggttcctacggcattgaaaaaggtcttatctgctccttcccggtccgcaccaccaaggatggcggctgggaaatcgtgcaggggctgccggttgatgcgttctcccgtgaaaaaattgacgctaccgttaatgaactgaaggaagaacgtgacgctgtttcctctttgttgaagcattaatgttgatttgctcttgcgccgggtttcccgttttcgggaagcccggttttttatgtcctgaagattccataaacctcattttctgcgggacagaagttttcttccgtgttaaaaaaaacgatggatgcagcatccgctagtttatggatcaggaccgcatattatacaggggagaggcttttacgctgaccggaaattccttgcgccaggatgccgcgcattgggcggaggtacagccggacggtcaggtgaaaaccatgaaaaacggccgctattccgagtggcgcatctttccggaagccgggaacgccccgcattaccggggaaattttgaagtgcttaatcaggcttacggcctggcgttgcatgaggctggagccctgcttaatgaagaagggacgttccggacgggagccaactggcctactgtgtggacccgggatatttcctattccacccatctgggattggggttgtggaatgtccgtgcctgtatgaacagtctgaatgcacgggtccggaacggggaggtggagcaggatactggcacgggcggttcctggcccatttcttccgaccgtgtggtgtgggggatggctgcgtgggaagtttactgcctgacgggggatgccgactggctgtccctttcctgccgagtgatggaaaagacatgcatgagggatgaacaggtgcttgcggccacgggcggcttgatgaagggggaatcgtccgtgctggactggagggagcagagctaccctgcgtggatgacttctgccgatattggggattcttgcagcctgtccaccatgctcctgcatgcggaggcccgcaagattctggcgcggatgttccgggagctggggctggaggagaaggcccgggagtgggaggagaagagcgtttccctggccgcggttattgagcgttttttcaggattccggaacatgtcctgtacgggcagtacctgtacggacgcgggtatcccgtactgtcggagaaggtggattccctgggcaatctgctttgcgtccttctggggcaggctggcggttcccatgccgccgggatggttgcctcccttcctcatggcgtttatggcattccctgcatccatccccagatgcctgatagcgtgcccgcctaccacaaccgcgccatgtggcctttcctggagggctattatgcgcaggccgcggcggcggtggagaatgaatctgccctggcgctggcggtcgcctgcatggtccgtgccgccctgttgtgcggcacgaacaaggaaaatgtccttctggaaacggggctggatgaggggctgctgctcagttcggatagccagctctggagtattgccggcatgctgggctgtttttacaagggattgttcggcatccgtctgtctccggattctctggaattccgtccttgcgttccaaagtcttttgaaggcgttcatgagttgtccgggctggaataccgcggcatgacggtagatgtgtttctgcagggctgcgggcaccggatagcgcggtgcctggtcaacgggcaggaggcccctcccgtccttttgccgggcatgaaggggcgcgtttttgtgaaattggagctggacggcggagaagaggatgaaggggcggtgaatttaacccgcatgggcagcagcctggagtctcctgcgtggaaggcggcgcgccatggtattgcatgggagtctgtggaaggagccgattattaccgtgtttaccggaatggcatccctgtgtctcaaacggagtactgccattatatccccgcacccggccggggggacgtgtctttccaggtgatggcagtcgctctggatgggagggagtcttatcttaatgaacccaatgattatccttctgcggattcccgcatggagacgcgcccctgcggcttgagcggggatgaagtctggttttcccgcgtcacggaatctccggacgctctttgttacaatgtcaatatagataagcccggagtgtaccgggtggacgcctttttcgctaacggcacttatgatgtttcagacgggaatacctgcgccctgcgcagtctgtacctgaacggcaggcgcgcaggcacgctggctttcccccatacgtcccgttccggaaactgggagtattttatttattcaacggcagtggaaacggtgatgacgcccggtccctgccgtgtggaagtggtgtatgattccttttccgaaaatatgaatcgtctggtgaatgatatggtgataaaacaccttcggtttacccgtatatcctgatattagttcatgaatgttatgtcgaaacgtttttttgccttgttgctggttctggggtccgggatagggagtgttcctgccatggggatggatgatgagtcagcttccagggcatctgttcctgcctcctcggacagggagggagcggagtttacccgtctgcccgtcagctggacggttaatcccagggatgccgccaatgcccgtgccgcctggaaaacgctgagcgcctatcatcggggcaaaccgaagacctccagaaaactgcatgtggtttacgtaacgttcaaggacaggcctgcccttgaaggataccgggaacggtatgatcatattctgaagaatattcaggcatattatgcggaccagatgcaggccaacggtttccctccgctcacattccagctggatttggatgaacggggcaagctggttattcatgatgcctatgtggataaacccatgagcgagatgagcgtgcagagctccggccccgtctcccgggaagccgccaggaaggtgctggcttccaaggggattgatattgagaaggaacatgtgctggtcgtttgccagcttccggacggcgtgggtccttattacggcggcggcttcagccaccagggcacggggtggacctgtgaccaggaagggctggatcccgccagctttctggatacggaaatgatgcagggcggccgtttcaaggtgaccaggggaaagaacgccaccatttacataggcggtacggcccatgaattggggcattccttcggccttccccacacgggcgacggatggaattaccccgacgccggagcttccctgatgggccatggcaattccacctacggagacgagctgcgccatgaagggaagggtgcctatttggcgccgacggatgctttgaaactggccagtgttcccctgttcaacggggtggagacggaacttcccgcagacgcctccttcgggcgtatgctcggcaagtatgtcccggggtcttttgaacggctggaggccattcccgttaaagacggattgcggctgaaagggagggttcatctgacgcgccccgcgtatggcattgttgcccatttggatccgcccggaggttcggattatgattccaatgccgtgggcgcttctctggatgaaaagggagagtttgatctcaccatctgcaggccgggatataagggtggttttatagaaatgcgggtggccgtattgaattgcgacagcacgcgcagcatgattactctgcccgtgtggatggatgcccggggagccaaggccccttctctggcccagatcgtttatttcggggatgttcagaatctgtggatacggggccgcacggaagaagcccggaaggcgctggcggaagtggaacgcaggcatggttcccgttctgaagtgaaagaatggctccctgtctggaagcgcgctctggggcgccaggagcccgcgctggaagttgttccggcgcagattcctgcggcaaccgccagtatcagcctgaatgactgcaagccttccgtagcccaggtggggtgggccgttccgttgtgggatgtcctgttcccgtcggatttggggcccgtgcctttcttccggacaatcggaaggccggaacgtttcattctggctcatgccccggctgtttttgcctatgacctggatgggcgctggaaagagttccgcgctgatgtggggctgcccttcggctcccgcggcagcgtcaaattcagcgtgtatttggacggcaggaagcttatggaatcccctgtgctcaaggacggggactccattcccgtgaagacggcggtagagggcggcaggaagctggaaatccgcgtggatgacgccggagatggcaatgccgccgattggggcattatagccaacggcatgctgacccggtaaattttctgcccccactggcggagaaatgtgacattaggcttgtcttttgccctttctcatagtgttctgtgggctagccatgattgggacgattgcaaagctatggggtgcggcggcgctggttgccggggcttccctgtttgcagaaacggctgcggagcagccgcccgtcccttcctctgaaaccgggcaggaaaatgccggagggaaaatggcgggcaatctgctttccggcactctcatgccgcagattccctccaatatttccattaccaatgacggcgccatcagggtggaggaatccaggaaggttatttttgaaggaccgcatgtccacatggtgacggataccggggtggaggtatttgcggattatgcccaggcggatatggaccagggcaaggtgtttctgaaagggaacctggccatttaccagagtgacggcaggacaaggaccaacagcctggtacgcgccgacagcgcggagtttgactgggagaacgaagtgcttcttacggatgccatccgtgcgaagatggagggattgattctgcgcagcggaaagtttgaatcccggaaggatgccgccggcaacacttacctggaagcccgcaatgcctccgtcacggcggaagacatcagcgaacctctcacctggatttccgccgacaggatacgagtgtatccggaagacaggttttctttcaagaacctgaccctttattacggtggcgttcccttcttttatttcccttacctcagccattcccttaatccggaagttggctatcttcccatccccggcatgcgctccatctgggggccttacctcctgaatgaatacgggttcctgatggggaaaaaatggtcggacaacggcatgccttccgcggattacctgggaaccctgcatgcagattaccgcacccggcgcggtttcgcctacggattggacatccgcgacgtgctgctggaaaaggattgtccggacatgacggggctgtccttttacaaaacccatgacaagggggtgaaaatcaacgccggtgatgatgagtaccgtgagcatctggacccggaccggtggaggttcgcgctccagcagatgtggagccacagggtgaatctccgcacggactggcggttgaaggccaacatcaacatgttgagcgacgagtacatgctccgcgatttttatccggaaatttatcagcgcaattcttctccggacaacacggtgcttctttcccgtacggacgatacgaatgatttttcactgttgcagcgttttgtccccaataatttctacatagcggaccagcggacggagttcagttatgagcgtatcaagtcccccgtattccgttcccccgtcatgtatgaaagccgcaccagcttcgctttcctcaagcagtacgttcctccgttcatgcggacggaaatccggaacatgctggacgggatggaccccggaacttcttcctatgattactgggcccgaatgctgatgacggacagctacagcaggttccactccttccatgaggtttccgtttccaagaaaatcatgggattcctgaacctgacccccaaagtgggcggaggctatacgggatattacggcgtggaggactacaaaccgctcaaccagggatttttttacgccggaacggatgccgatttcaaattctcccgccgttattcttccgtatatagtgattcctttgggctgaacggcatgaaccatattgttcagccccattttacgctggcgtatgtcaaaaccaaccgcctgagcgagctttatccccagattgacggcgatacccccacgaccaatcccccatccttgagcataggcagatacacggagattgattccctgtccacggggcttgtcttccggtatggattgcgcaacatgctgatgaccagccgggacgctaattcccaccgctggttttcctgggatgtgttcatggatgcctatctgcatgatcccgtcaaccagcgggatttttccaaccttttttcattcatgcgctggaatcccgttccctggatggaataccggtcggaaatgcaggctcccgttttgggtaaggacaagatttccggctgccgtgaatacaacaactccctgcgtttcatgccatggcgttccacggagctcgtcgtggggcaccgttatttgaaccagcattcccttctggaggacagcagccagctggatctgcgtattttgcagcgcttttcggaagcctgggctttcagcggcaagtggcgtttttccctgttggacggcaagctggacattcaggaatacaatgtgtaccacaatatgggatcctggtatttgggcgtgagcgctttcgttcgcaagaacgggaacaaaaacgaattcgggctgggcatcagctttaccatccagcagaccggagattatatgccggtcaaattcctttgatgtccggaaaggacacggttttttgcgaggtttttcccggaagctttttcctttttcagaggattcgcgttttgagaatgggttctgcccggtgcggggtgttgttccggaaagggaaagatatgtagctggtcggcaagaggcggaaagcctacggttggaaggatggagagcggcctgttcccggcgtgccggacaggaagaaaggaggaaaaggaaaggagtcgctgccgcgcttgtgccggaaccttggcttgcattccggcagggaaacggggaaaatgccagggcatggagcaagctgcggcggaaaaccgtccggcttcctgcacgaataatcataaatgaatatgaacgctcaggaattgatcgagacgctggaatggcgttacgccaccaaggtattcaatccggaccgccgcattccggcggaggactgggaagcccttctggaatccctgcatttgagcccttcctccctggggcttcagatgtggaagttccttgatgtccgggatcccgccgtgcgttcccggcttagggaagtttcatgggggcagccccaggttacggacgcttcccatctggtggttttctgtgcccgcagggatttcaaaccggaagacgtgcagcgctatctggaacgtattgtggaagtgcgcggtgttgccatggactccctggaccagtaccgcgcccgcatttttgaactggtgggttccaagtctccggaagtgctgaaagcctggctggaacggcaggtgtacatcgccctcgggttcatgatgagctgcgccgcggatctccgcgtggacacctgcgcgctggaagggttggatccggccgcctatgaccgcattcttcatctggaaaattccccttattacacgctttgcgccctggctctgggttaccggaatgaagaggcggataagtacgcccgtctggcgaaagtacgttttgaccgggatgaagtcattccggtcatctgacggagttttttactaatccccggtttcaagcagtagccgcatgtcttccggcaggggggcttccgcggtgaaggtttcttcatcaaacggaaattccagtaggcaggcatgcagcgcatggcgcggcagaaccagccgctcctccagttcccggctccatccgtgctggatgtattccagatagcaatgttcggacgggccgtaaattttgtcacccaggatgggatgtcccaggtgcgccaaatgtacgcgtatctggtgcatgcgtcccgtttccggaatgcaccggaccagcgccaggggaccccggcgtgtattccatgtccgttctttccggaaaacggtagtgcatgcttttccggctgggtgcacggcctgtttgacccatatgcggctttccgcgacttccccctgtcttaaaatgggggcggtgcatgctgtttccgtccattcaggccattcctgcacgattgccagatattccttgtgtatcaggcgccgctgcatggctcttcccagctccctggccgcccttttgtgtttggcaaccagcgtcagaccgctggtttccctgtccagtctgttgaccagggagagggcggctccgttggctatttcatagcttagcagggcttccacgccttccaggaggcagggttcctttttcccgttggacgggtggacgatgaggggggctcccttgtccaccacaatccagtccccggattccgccgccacctcaaagtgcggaaaacaggaaattggtgcttcggaaatgggaatccacatggcggatgggaggtttacagcgcatccggacggatgggcgcccattcccccggtttcaggttcaggctgtccagatgcagggagccgatggaaacacggcacagagataagacgggagcgcctacggcagccagcatgcggcgaacctggtggtattttccttccgtaagcgtcagcagggcgcgtcgcggttcccggatttccagcagggcgggggcgcaggggcgggtttccccgttcagcgtgagggttccggaggcgaacaactccacggcttctgtcggaatgttctcctccgtgacggcttcgtaaactttggcgacgtgatggcggggggaggtcatgcggtggatgaattttccgtcgtccgtgaggagaagcaggccggaagtttccttgtccagccgtcctacggaagaaaccgcagggttcctgtgccgccactggaagggcagcaggtcgtaaatcaaatccccctccccgtcgtcatggctgcaggtgtacccttcaggtttgtaaagggcggcgtacaggccgtccgggaatcccacaggttctccgtccagcaggatgccttccgcctgcaccttgtccgtgggggaggagcatggttttcccttgaatgtaatggagtggcgtttgatccaacccggcgcttccctcctggaacaatatccgtagcgggataaaagggcatccagtctcatgcggcatattttttcctaacgggaacaaaaaacaaggttgaagtatgcctccccggctgatagcattaaactattacatgcggggccgccctggtggggcgctgccgttgttcaccatttacgcttatatagttccatgattgaaacgattacagaagaacagttgactccccagcaggccgaattttgggtgcgcgcccgccaggcggtggacatgaacaattatccctatgccgtcagcctgctcaaggccctggtaaagcagctccccggttttctggaaggccgcaaggcgttgcgcgcctgtgaaatcaaattgaatccggaggccaagagaggggggctgttcagcggcatgaaaatcagcaccagcaagctcacttcttccaaaaaggacgcggctacccagctttccgctctggaagacgaattggaaaatgatccttacagcattccggtaaacgaggccctgtacacggctgccatggaagtaaatttcccggatctggccgcttttgctctggagaccgttcgccaggggcatcccggcaacaagaaaatgctccacatgctggcctcccattacgtttcccgggatatgccggcccaggctgcggaagtgtaccatgaccttgtgaagctggatcccacggacagtgtggccgtaaagagcgaaaaggactgcatggcgcgcgccacgatgcagcagcagaagtgggaggaggctaaaagcttccgggacgtgatgaagaactcgtcggaaacgaacaccctggacaagagcgataagaaagggctcacccgtgcggaactggaagagcgcctggggcttctctccgcccgttacgcccagaaccagcaggatctggccgtcgtgcgcgacattgcaggcgtttatgaacaaatggaagattgggccaatgcctattccttctataattacgcgttcagcctcagcaacaatgatatttccctggaaaacaaggcctcggaaatgaatgagcgatgccgcaaggcccaggtggaggaaatccgccgccgcgctgccgcggagccggataataaggaacttcaggaacagcttgcccagttcagcaaggaagctgcggagcagcaggtggccttgtgccgccagcgtgtggaaaacaaccccacggacccgcaaacccgttttgagctgggccaggccctcttcgactgcggcaattacacggaagccattccggaactccagcgcgcccgcaacaacccccatatccgcatccgcgccatgctgttgctcggcaagtgctatgacgccaagaacatgcatgatatggccctgcgccagctggaggaagccaataaggaattaatagaaatgaatgacaccaagaaggaaatcctttacatgatcggcttgctttatgaaaagcagggcaagaagggggaatccctggctgcattccagcagatttacgacgccgagtacggctaccgcgacgtagccaggcgcgtggaatcctcttacggcaattagggggttcccgttttgtgcccgtaatgggacgccgtgctcaaagcctttgccggaaacggcaaaggctttgctgtaggaaggttatttttatttctgtggacgggaaccgtaacagctttcatcccggcgggcaacggagaggggcgggcgcccctgtgttttttctttcccgttccggaaggaactgaaaaaatgaagagagaacaagctgatgcaggcattgctgtgaccaatcataaatgcttgaaaagggttgaaaagggttgaaaagggttgaaaagggttgaaaagggttgaaaagggttgaaaagggttgaaaagggttgaaaagggttgaaaagggttgaaaagggttgaaaagggttgaaaagggttgaaaagggttgaaaagggttgaaaagggttgaaaagggttgaaaagggttgaaaagggttgaaaagggttgaaaagggttgaaaagggttgaaaagggttgaaaagggttgaaaagggttgaaaagggttgaaaagggttgaaaagggttgaaaagggttgaaaagggttgaaaagggttgaaaagggttgaaaagggttgaaaagggttgaaaagggttgaaaagggttgaaaagggttgaaaagggttgaaaagggttgaaaagggttgaaaagggttgaaaagggttgaaaagggttgaaaagggttgaaaagggttgaaaagggttgaaaagggttgaaaagggttgaaaatatgtgcgttttggggagaaaaggaaggggcgcgcaataagttacgcccatgaatgcccgtaagggtcaaattcggaaaatcgtaagggtcatttgtcccatgtgaaacactcccgccagcgtcgcgcgtatttcgcggaagcccggcggcccctccgcgggctggccgtagtcaggggacggaaacgccctggcggtcagcagcaatgcggacattatccggggaaaggtcgatgccgtgggcgacgtgtcccagttcgcgggcggcaacaagagtagtcccgctgcccatgaaagggtcgaggacgtcccggatattgggagacagtttgcggggcttgtcctggagaaactgaaggtggctttggaagcagggctgcataaggcgaggttgctgaaaaagcatgggctgtctccggatgttaaggcgcggctgttggaggggggatgactgcaccctgaatgcggcgtggaaagatttttgggacaagcggcaggcgtttttctggacgttgaaacagtaccacgcggagcggaggagggaggttccggaattggttaaggttctttttgattcgttcgtcgaacggttgtcgctggcgtttgatgaagaggcgttgagggcggcttttcagaatgtgctggaacaggtggagcagtctgttacggatgatgtacaaatggagtttaatttttaaagaatgttattctccgttttctttaagcttttttaaaaaatcttcgtgtttaggggatattatatcaaattttataggatgtatttcagccttgtgtacaggtatctttttattttttgagtatgagtgggtaagtccattgattcttttttgagtcgtatcaggagattcattgcattttaatcctaatataacgctttttataaatttgttgaatccgcctatgaagaaataacgtccatgaacgcatgaaggagtatctatagggatgataattctcatttcctgctcatatttccatgattttccttttgtaataaacgagtcgtctatgcggtatgatgtgattttgttattaattgatgtataatcgcatagcatgatttttttcactactctcatttcagagtatttgacctcccatagtaaggtgtggtcatattggaataggtgatctcctgttttagagtcaatggttgaaaaatctgtaaaactgggcgggtcgtgtttgaaattttaaaacatagtatttgtcattttttctgtctgatattccgaaattaagatctcctcggtaatttttgagatgaggaaatctgaaatgaatgcagcagcctctatgcttatctccataatgtccccacatgggggaagaatggtaggacttggaaaaacttaaaaagccataattcaggttagcgggatttggcgaagtttgatgttgaagaataaattctgttgggtcgttgcattcttcttgtagaatcactttgagtttttcattttcaaacaccttgagcatgttctcataggtcatgaagatgtaggcatcaataaattccatattctcttccgtcatggggattcctaatcaggcggtcggtctgctggggatggtgttcaactgggggagggaaagagcgttattctccgttttccttaagcgattgtagaagattttcgtgttcatccgaaatgacttcaaaggtatctctcgttggttggactttgctaacacttatacaattacattttttagagctgtaggtgattttcgtaccatttttttctcttaaagtaaggacgttgacgcgtgattgcgtcaatccttcaggataagggcagcgcatccccaacataatactttttatatacggattgaatcctctcacaaattttaaattgccttctacttctttaagaggggaagttgggataagaacacgttgttcctgttcatattcccaggacttatcttttataataaaaatacgatctgtttcgaaatattctttgttttcaaatttaatatatcttgatgaaatttcatttagtctggaacgttttttctgatagagaacatcccatagtatagtatgattagttatttctggtgttattgaataaaaggattctccttcatactttataagcaatttcctatatatgtaggaaggatattctggataatcgaatttttccttcacaactattttgttccgggagagcagggaatctgaaatgcacgcagcatcctttatggttatcagcatagtgtgcccacatggggggtgatttataggttttggtaaagctcaggaagccgtattccttgcgcaaataatcgctattggaagagatacatccgtcttccaattttgttggcagggctggcatgaattcgaatggatcattgcattcttccgggaaaaggactttgaggcgcttcttttccaatgttttaagcatgttctcataggtcatgaagatgtaggcatcaatgtattctatattctctccagtcatgggaatatatggaaagatatgtgagaaaggaagtcaatgacattcgggagttgtggcggatgatagcgggttttgaaaaagctcctgaggggtatgaaccccattgtacaggcttatgtagaaaactatgatttgccggatttgcagggaatgctgcgggaaaagctggcgatactggaagggcgcaagggaataaccggggcctccacaggcggcggaacgtcctacaccgcgcaggagaccatgaatttaaaggatcatatagcctgcttgtaggaagcgatcacgggtaagaagatggaggaaggggatttttccggcctggccgccgcggatgtttgcgtgtgcgggggggaggcttgtttctttttcctgcggtgtttcttttgagctttccggctggtccaggaaacttgtgcgagcttgtgcagggcactcttgccgtatttgtcgataagagcttgcgcctggtcgggggttaaggaatccaggaaagcgttacaggcgtgcgcccgcatggatgatgcgctgattgtgtcgctggtcagcaaagcaagatcggaatgagacaagttttttactgattccggacagtatagtttggcaagtttgtacacattccgggtaacgcgttgcggatggtagccgttacggaagagaatagtgaaaaattccgataaggatatgcaggcgtgtgtccgctatttcttcttttaccacatcaagctgatgataattcaagccgcattcataaagttgttttgagagttccggaaagatgggagcggcatcaaaaggcgcattccattgctcctgtgtttctccgtaggcgtgcaggaggtgatcaagcaggtctccgtaaacgtgtataacagagggactggagctcataacgcacccccttccattctacactttattctacacaataaaggttcaatcagcataactgattgaaccttaaaaatggtcgggttgacaggattcgaacctgcgaccccctgcaccccatgcaggtgcgctaccagactgcgctacaacccgatgaactcggaccgaccagggtcgtgtcttgtgacggcgaggtgtatataggaaaactttagtgttggcaagagtcttttttcatagcataccttttttgtcatgaagcaagttcaagttgcagtcgtcggggccagtggctacaccgggcaggaattgttgcgcatcctgctgaaccatcgcggggtgaagctggtgtgcgctacttcccgccagtatgccgggcagccgttgtgggagatttttccccgtttccgtcaggttccgggttccggcctgaagtttacggattccgatgtggaggcgattgccgccactggggcggaggtcgcttttctggccctgcctcatggcgtggctgcttcctatgcccgcggcctggtggacaggggcgtgcgcgtgattgacctgagcgcggattttcgcctggacagcccggatgtgtacgaagagtattacgggaacccccacccggatacggccctgatgcaggaagccgtgtacggtttgccggagtggcgccgggaggagattgcccgggcgcgcattgtggcttcccccggctgctatcccaccagcattcttctgcctctcattcccttgttcagggcgggcatgctggagccggaggacgtggtggtctgttccggcagcggcgtgagcggagcagggcgcaaggcatccattccgctgctgttctgcgagtgcaatgagagttttcatgcctacggagtaccgaaacaccgccatttgagcgaaattgagcaggagctttcccatgccgccggggaaacggtggtaatgtccttcaccccccatttgattcccgttaatacgggtatttgctccacgattacggccaaagtgaaaaaaggggcggaccctgagtccgtcggccgcctgctggaagaagcctatgccgcggccccgttcgtccgccttctggggcgtaaccagcctgcggataccaagaatgtaacacggacgaactgcgtggatattggctgggcttatgatccccgcacgaaccgcgtgattctgatgagcgcagaggataatgtggtgaagggcgcgggtgggcaggccgttcagtccttcaatatcatgtgcggatttgatgaaacggaaggcttgtgggttctgtagctttttgatacgctgaaaggcactttcaagacgatgaatgattcatcctatattccggttgacgggggcgtttgcgcgccccagggctttttggggagcgccgtaagctgcggcatcaagaagcctacggccacgcgtctggacctggccctgatttattccacggaaccctgcgtttccgcaggaacgtttacgaccaaccgcgtgcaggccgcctgcgtgaaggtgagccgggagcatctccggaaaggaaatatccgcgccatcgtggcgaacagcgggaacgcgaacgcctgcaccggaacccggggggtggaggacgccaggggcgaatgccgcagcgttgcagagcttctggggctggagcctgcagaagtggccgtatgttccaccggcgtgattggtctgccaatgcctatgatgcgcatttacccgaagtttccggaattggcggaggggctttcccgcgacaaggggcatgaggtggcccaggccgtgatgaccagtgacacgaaggagaaaattattgccattgagtttgtagtgcagggcaaacccgtgcgcatcggcgcctgctgcaagggggcgggcatgatcaatccctgcatggcgaccatgctgtgctttatcacgacggatgcgggaatttcccgcgatgtgctggagctgtgcgtgcagtccggagtgaagagttcttttaactgcatcaccattgacggagacatgagcacgaatgacacggttctggtgatggcgaatggggcatccggcgtgaagctggaaactccggaagatatttacgcattccagcaggctttggcccatgtgatgctggaactggccaagcacatcgtgcaggacggagagagggtgaccaagttcgtcaccgtgcatgtgacgggaggccgcacggaggatgaagcgaaaaaagcggcggaagccgtagccaagtcttccctggtaaagagttcctggaacgggaatgatcccaactgggggcgcattattcatgccgtgggctactgcggagcaaaggtggatgaagagaagatagacattgacatcgccggtctggccgcctgccgcggcggcgtgcaggcggatactccgtccgacgatttgcggcaggccgtgcaggttcccgcgttccaggtggatatcaatttgaatcggggcgagttttcccatacggtgtataccacggatttgtctccggaatatgtggatttcaaccgttccgagtatgcatactggaaccaggcgaaagcggacggcctgacctgttaaccgtttttgtcatggcgcgtggcaaatgccgccagggaaaggcggggggaatggtccccgccgccgggatgctgatggaggtgcggcgccttctggatgaaggcgccttccgcgtttcccgtgcccagcgtttctgtaccggtgcggcggattgctgccggttccgcctgaccggggagacgccgcatgtaacgctgggtgaggcatgggtggcctggaagacgtggcgtgcttccggacgcacccggttggagctgcctccggacgggagctgccctttcttgagcgggcagggaagatgcatgatttatgaaggcaggccgttggcgtgccgcactcatttctgcgtaccggccgggggcgccttgccccgccgggaggttattgacctgatccatgcgctggaagatattggcgcagcgctgggcggcgatggcgcagcccggctgccggaggccgtggaacggctgtcaagattacgtgtaattaagaaaaaagtataaaatatagcgccttcagaaataagcacgcaagtgtactgaaataaaccaaaattgaagtgcgtatgatgataaatgagtatatttactaaatgtttctgagttctcgcatagggataaaagagcaaaagtatttatatttgaatttgtgctaatgaataaataaaatattccagatttaactttggtgtttttggttgtaactgttatttaattttctccggaactggttgctttagtcttgttttattaattttttctgttttttttgtcgaatataaaaaattaaaatcttttgaaaattttatagaaaggctattctacataattctaactttctctatctatgtgttgattgagcattcgtcaaacaatgctttctcaacaatggagacacatgcattaacattttttgtgatttcgctttcccatattctgactactctccaacctaatgcaaacaattgttcattgttctcattgtctcgttcaacattccgaaggatttttgctctccagtattctgaatattgacttaattcttcctcaagagaattcatacctcgtaacgcccaattatggccatgccaaaaatcaccatcacagaagacaacaactcgttgtttaatgaagacaatatcaggtttacctggtagttttttatagtttacaaaatatcgataatttttttttccacagagcttttctcaatatcaactctggacgtgtatctttcgattttatggcagacattatctttgaagtagtttttggatcacgtggcttcatttcttatgaattatggttcttttattcttattactgccatttgaacgattatcaatatagacatttgttattcttataaaacttgtaacttcttagatattttgctttttttgtggttgtttttaagtagagcccggatattacaacatactaagaatggaaatattatggttagacaatgtgattgataaattatttaaataatcgtaaattttgtctaaggagtatttgtttcaagattaattctagagaaaattgccgttaaaactctatagacatttgaagatacgtcctccgaaaccaactgacaccattgcctgattctgttatcacttatctgatcaacttcccagtattcctttaaaatttcttcatcagtatcattgatcatatcctgaatcattttactatacgtatttatcctgccaaatgcggctggcatcttcacagataatcctccatctgttggaagaataacctggcctccggcagaaaaactgtctctcacatttgtatttactatgccctgttgcgttgctaaccacaaagcatacctgttatattttttcttattcttttgactgagtatttttggaaataatacataaccatatactgtatacttctctttatcctcatgagacaaagctgtccaaagtcttactgttggaggtgcgtttacttcttcaacatcagctgcccaccacagactttcgtccgggttaagttttgacttatagtaggcggaaacaggcgcaacaggattatcaagtgagcgcaatttatcataagaaactcccattttgtcaaaaattgtttctcctgcctttaagcgcatatcaattttatatcttggataatgagttactgcaatatcagataaacattcttcgtacggtctcgaaagaaattcaaccggtttcccaagtttcccaaaagtcagatatatacgttcgacatcaatatttcgagtagattcgagtatactgctcccaatggaggtccaatgattttttaccgtactttttacttcgactccatagtattttgctgcaatgatatcaggaaatattgcgccagatactaactgaatacttccttcaaattctgttccttttgacgcctcacaaactgcatcgaacacatcctgttcgatagcttttccactccttttagagtagtattcctcgtgaagcctggcatcttgatttaacaaggagtcagttttttgcatcatttgacggaacacctccaacggtggttttcggttttcagatattatcataattatttctttttgaagtacagtagccacttgttttcaatatttttggctatgttataagccagaacgcaaggaaccgcattcccaatgattttataagcctcacttgaagagactgctttattcaaggatgtttttttcaagatgaactgatactcatccgggaatgtctgaattcgagcacattcacgaacggtaagccttctttcacaaagtccagctgttaactctgcgtgatacttgccaccattttctttgctaagccttcgatattcgatgttaccatggtgttcggatcgtattgtcggaccgatagaatccagtttgatttcagtttgtccctgacaatggcggcccataaatttagcttttgaatatttctgttgagatggatcattagattcatttggctcaaccaaaccaatcatagcatcaccacacgttacagtctgtgccaatccttctccatgagttttaatcggatacggatcatattttgctggaatagtggagcttgttagtgctctaattgctctttcagttagtgcacttttcttaaatccaaagaatataacacgttcacgcgattgtggtactccataatcgggtgcatacattacctgagcaggtacaacaatgtagcctccatttcctgcttgagcaaagtcatgttcaattacctcctttacatcatcaagatttgtaagaccttttacgttttcagcaatgaaaagtttcggagcagttagtgtcacaatttcccgcatccacatataaagctgacctctactctcaacagaaggttcatcattcgctaagacctgaccaatatgacttttttgagaattgaatcctaaccgtttacctgcaatagagaaatcttgacaagggaatccacctgttactatatcaatatcggcggggaaaatagcttctcccatttttgcgcgtttagcaagatttacaatactttccaaatgatatatatcatttgcattgcctttttctttgagaagtaggaaacccatgcagctttagcgcttggccgaatatcgttggcaaaaacagtattgaagatggtcggagtaacgagaacccaatcgccaagatcttttttaatccattctggatgaagattagtattaattgattttttcaggcagacgaaatcaccttcaaagccaatatccattcctccgcatcctgaaaacaatgaaagtagattcatatgtttatggtcactcattattagtatctgacaaggagtagttatctgcattcttccaagaatgctttcctaacatcgaagtctatctgatgttctttgttgtaattatctataaaatttatcgttttgtaagtcgttttactttttggaactccaagttattctttgtgtaaaaatttttttgactcaaaattttacattggattgattttatgtccaaattaaaactcatagtacactttctgtgtgtgtaggagtagagactatgcgaatcattataatatgtttatgtatcttttcaagagaaataaaatcaaagtgtcttcttccaagagacgttttaacatcttaatctctttttatttatatcataatatctatgaaccaagtaaagaagctgcctttcgagattcatacttttcttcagaatttttctctacatacaggtcaacagcgccttgcagaatccctgttcaggcctccgagtccgtttgtttctctttttcctgtttggaggccagatggcgcagggcgctggcggcctttttgttgccgtgccggacggctttctgataccattcttccgcctgtttatcgtcctgctcaatgccgtagccgtgggcgtagcagttgcccacattgaacatggctgtggcgttgccctgttccgccgccttaaggtaccatttcagggcttcttcccggttgacgggcgttccttttccgttcagatggcaccaccccaggttgagctgggctgttgtatgcccctgttctgcggctttggtgtaccagtggacggctttggccatgtccacttccatgccccggccgttgccgtagcaccatcccagcgtgtattgggccgtaatctggccctgaagggctgatttgtgataccataccagcgctttgtccagatccggctccacgccgaaaccgttttcatagcaccatcccagattgtactgggccgtagcatggttctgcatggcggcttcttcgtaccagtaagcggctttccgcgggtttttgggggttccgcttccgttgccatagcaccaggccaggttatactgggcgcgggggtctccctgttccgcggcctgcttgtaccagtatacggcctgttcccagtttttccggctggggctgttggcataaatccagccgaggttgagctgggctaccgcgtggccctgttccgccgcttttttgtaccagccgatggcctggtgttcgtctttttccactcccaggccattgacatagcagaacccaaggtcaaattgcgcggtggggtgcccctgttcggcggctttccggtaccagtaaaaggccttgtcgttgtcctgaggggcgccgatgccgttggaataagcccatcccaggttgagctgggctgtaacgtggcccagttccgccgcctgctggtagcagtagaaggcttcctgctggttttccgccaccccgcgaccctgttcgtagttgattgccagctggaacagcgcctgggcgtctcctttcagagctatttgctgaagggtttctacgtcgacggaataggtggagacggtgttttcctgctcgccgtggttgtgggaagcgtcattcatttcacaggtaaccgcactggggaacactgggacaatttttgctctcctgaacttgtgcgctcgccgattctgcacatttcccccataagaatcaagacccgtttttattggggccggagttcggaaagctttaccgtccagcgcgcctgcggcgggacagggcgaggaatgaaccgccaaggaataggattccggcgccgggttccgggattctcagatctcccagcggagcggtgaagctctgtatttcccccaggcggatgcccgtcagtcccgcttcttcgtaattataactgtacacgtcgttttctccatccatgctggtcagataaatgtcgcagtgggaaaggccgttttcatccgtatagtcgttcacgactactttctggcggaacattcccaccgcatagtcgtccgagtccgtcaggtagataaccagattgtcgtcttcgtccgtgtcgtagccccacatggtgatggcgtggcctctcccttcttccccgacggtcagagtggttccccagttgttgttgatgctgtttgtcagcttctggtaaacgccgcttctggtgtctccgtcccagaagctgtatgcggaaaataaggggttgtcaacagctcctccgcttgaagactgcgggactgtcagtcccagctctttccagtatcctccggaagccgtcgtcgtagaaaggctcggataggcggtggtatccagcattccgccgttgatccaccagttgtaggcttgttccacggagcctccgctgtttgtccagttcgtggagatggtctggtaaatagccagctgggcgacctgcggcatgacatcgtaagtggcggatttcccgttgggcgtggcggatttcaggtcgcttctggtatcctgccaccattggagaacgttggaggccgccgccgcccagcagatattctgatcataaggaaggtacagccattcattgggccgtgcggaaaccggaggatttagcggattggtggggtggggcttggtcccccatgtccatttggtttttttattgcaatcataccatccgccggattcggagacgttttcaaggaatacgggcgcggcatgaagcgctccgggaaagagcagtgccgccagagccggagagagggagcggagagtcataggaaaaaaggaatatgtgtaattccttttttgttaaaaaaagcccgggagggtcgtcaagataataaataggggaaggaggcgaataaaccccggagaggcagatttttttccgaagacgccgggaacgggatgtccgggggacaggacagatgaatgattttcaggggctgccgttgttaacgggggacgagccagggagaagtgggcgcttccggattggacgctacatctgcgggggagccctcggccacgatattgccgccgtgcctgccggctccggggcccatgtccaccaggtagtccgcggcattgagcaggtccttgtggtgttccacgcagaggatggtgtgtccggcatccctcaggcggaaaagggctgccaggagaagggccacttcattgaagtggaggccgctggtgggttcgtccagaatgaacagggcccgttttccgtcttcctccagtttccaggccggggctttggccagttccgcagctatttttatgcgctgggattctccgccggaaagggtgtccgccctgcggttgagactgaggtatcccagccctacgtcctgcatgcttttcaggatggcggcggctctgggcagggaggaaaagaattccgccgcttcgtccacggtcagggccagcgcctgggcaatggatttccctttccaggtgacttccagcgtttccctgttgtagcactgcccctggcaggcgtcgcagggcattgccacgtttcccagaaagttcatgtccacttcaatcatgcccgttccctggcaacgttcacagcggcctccgcgaatgttgggggaaaagcgcgccgccgtatatcccctctgcttggaaagggggagctgtgcgtaaagggggcgcagcacctggagcaggccggtagcggtggccggtgtggagcgcggcgttttgccgatgggcgactggtcgatgacgacgaggcggttgaagtgttccgttccctgcacgcggcgcggaataccctttttcccggagaggtcttgcctgactgcggggatgaggcagtcccggacaagggtggattttcctgaaccggaagggccggagatgcaggttagtgtgccgaccgggatattcagagtgacgttgttgaggttgtgcttgtccgcaccggtcagtaccagacgccccgcaggagccgtcttgcgtccggaggcgggcatatttcgcttgcctgaaagccattctccggtggggctttcggcattttccagtatctccgcaagggagccctgtgccagaatacggcctccgttggttccggagccggggcccatgtccaccaggtgatccgccgcggttagaatttgttcatcatgctctacgaccagtactgtgttgccctggttccggagcgtccggagagcgcggagcaggcggtccgtatcggcggggtgcagtccggccgtgggttcgtccaggatgtaaaggactccggaaaggccgcctcccagctgggaagccaggcgcgccctctgcagttcgcctccggagagggtgtttgcctggcggtccagggacaggtaggagagtcccagctcattcaggaagcgcacgcgtttgttgatttcctccatgagcggggtcaatgccgccgccagggaggagggcgttttcagtcgttccagttctcctgccatatcttccagaggaagagccgtcagttccgcgagattgtaggcccggtccggcgcaggcatggtgacggccagggccagaggggaaagacgctggcccccgcaggcgcggcacggaccgttttcctgttcattcaggccggttccccggcaggaggggcatgcccccagcggggagttgaaggaaaaatggcggggcgtaagctggggtagaaggaagcctgtttccggattgcggtagcgggtgtggaaggcccggattgaggcttcctctcccggtatggtgatgatggcccgcacttcgtccggattgatacggagagccgtttgcagggaatccgcaatgcgcgaggccgtattttcccctctgacgatgaggcggtcaatgaccagggccgcgtccggaggcggggggacgggggaacttatttcttcaatatcccgcatttctccgttccagtaaacccggaggaagccctgccgctggaagtcgcccagcgtcgctgcgggatcctgggccagcaggttttccgccggagcggccagaatcaggcgcgtgtgttccggcagggaaacgagttcctccgtaatccggtccgggctcttgcgttccagttcctttcctgtttccgggtcatggggcgtgccggcagccgcgtaaaggatgcgcaggtagtccagaatttccgtgatgctccccagcagggtgcgggaactctgctgcctggcggattgctccaggcacagggccgggggcagcccggtaatgctgtccacttccggtttttccggttgatccatgccctgcctggagcgtgccgacaggcagtccagaaaacgcctgcgggattcggaaaaaagcgtatcgaacgccagggaagattttccggagccggaagggccgcagaatacgatgagcttgttggacggaaggtccagatccaggttccggaggttgtgctggcgcgcgccgcggatggaaatgggaagattcatgtcacgtaaggcaggtaaaggctccctggtgcgtgccaccttcctcaatgatgaggcggcgcgccgtgatatctcccaggaatttggcgtgccggtggatggtgacggtttcatccgccgtaagcgttccttccagagacccctgtatccagatgttttccacgcggatggttcctgtgaccagcgccgtcgtctttttttccaccaccatcctgtgggcgcagatagagccggagatgtgctggtccgttttgattttgcaaacgccgcggcacaggaagtcgccggaagccctgccgtataagaccaggtcacggcattcgatgttcagccccttcaggtctgcattggcctgcacggtaacgcttccgcaggtctgcaccttggtccggtgcgttctgctgtgtaaaatgacgtcgtccagtttgatatacgcggagcaatggccgcacctggcggaaactgccgtggcggggacggaggtgcttttgcggcaggagaagcattccacctcccgggcaggcgccgggctgctttccgcagttggggggagtgtccagggcggtgccggggaggggtggctgattttcccggagggcgcggtgctgatccgggggacgggatggaaggtggggttcatggaacaaagagggcggcaaaagaacggtccgttcttttgccgcccctgaaagtagcaggcggagagttttttattccgcgtcaatatccagcgtgctctggctggccggagcatgggtttccggctccggagcgaaggtatggacggaagccgccttcttggcggcggaagcccctgtggctcctaccgtgggggcgcccacggtagaatggccaatgaagattgcaccgccttcaatagccagggaggcggcctggatgtcacctacgagttccgccgtgcttttcagttccacgcggtccgtgactgttacattgccgatgaccttgccgtggatgataacggatttggtattgatttccgcccggatgacggcgttctggcctacggaaagcaccccttcggaggaaatgtcgccttccacggtgccgtcaatcagcaggtcatcggaaaaacgcagggaaccgattacctccacatcggagttcagcacattgcgggtcagctgctggacacgggtggtgggggcgtaggaaggcgcggcttccgcaaccggttcggggatgtcctggctcttggctacatccatccagctgggggtggattcaggatttttattgcccttgggggcgggaacggtagtgaatgatccaaacatggcgttaaaaagagggggtgaaaggtaagatgggagctcttgaaactcgtccggtttaatgtacatcacccgcatgtggatgtgaaacaattttctccggcagggataaaaaaatgtgtctgttttttatcgttgcgctgccttgggcgttccggtagtgtgtgaccgtctttccgcaattgttttctgtggatattttcgttttgaaatgagtgatttatttgaaaaaaagctgttcctttctccggccgcgcgcaggcacggcggaaaagcgggctttgcgctgggccgcattctttccgtcatctttttcgtgatcgcgctgggaatgtttttcggcggtcttttcttctggctccagaagcgccaggcatccctggattccggagcggccgcgcggatttgcgccacgccggagatgttgtccggagaattgaaagccgctctgaaagacagggtggactatagtttctggcctccttatcacatttctccgatggaaaagcaggacctgctgcgcaactgcctggcggaggcacagaaatatctgagcgccgcggatgtggttcaaaaatcctcttttgtgtggaagtccctgcaatcgcttcctttaatggtcaggcattacgccatgtctccgcctgaagcgattgtcagcaggcctaaggggcctaaaagctttgccgtgtttgaggtggaggggcatccctgcgcccagcttctggttggttttgaaaagactcccgatatggaattctgttttttcaaggatgaacaggatggttcctggaagctggactggcagcagtttgcccgctttcagccgatgaactgggaggattttgtacggggaaaaggggaggatattgcggaattccgcgtatggatggttcgggagcgcatgtcggaaaataaggatgactacgcatttaagctgattgctcccgggatgaacggttccgaagagcgcagcattgcccgtcccatggtgtatgtccccagaaaatcggaaatgggcaagcgtttgttcatgttgtttaagatcaatgaggagatggaacattccccataccgggtgttgaacgccaatgacgaggctgacatgctccgcgtgcgggttcttctttcccgcagcaaagagcccaaccgcaagggggaatattcctttacgctggtcaggctgctgggggaaggctggtacggcctttctttcccggaataaaaaggaaggattgggccggcttcttgctttgcggaggatggggatgcgttttaccggcggtggaaacggggagggggcccttcatgtgggcgcctggggcggtggggccggaaagggggcgggcatggcgtaaggcgtgcggcatgatgtccgcggcagacgcccgctgaccagaaagggccgtggtaatgcggcctggggttccatgcaggaacatggcagccgcagtagatgtccctgatgacgtaaatgggtgcgcctgcaggggtataggcgtaaatgggccgtccgcatggggaatatccccagatggggaatccggaggggtcatacaggaaaacggtctgccctgccgcaggtacgcggatttcgccatgcaggtgaatcccggcttccgcagcgggggaggaaaaggccaggagggcagatatggcgcttccggcgcagcaggcaagaagatggtttccggcagggttgttgttcatcggttttttgaatggtggttgacggcagttatccggtagagcggagtctccgtcccgttttgtgtaattttccatgtccgtcattcagggagggggtaaggggaataccgtcttgacctggaggggcgccccgggcaaagtgaccgcgtgacgagattcagaccatgcattgatttacacgacgggcgcgtgaagcagattgtgggcggcaccctgacgcaggatggcgtttcattgcgcaccaatttcgtctccgaccgcggcgcggcatggtatgcggatttgtaccgcagggacggtctgagcggagggcatgtgatcaagctgggcccagggaacgaccatgcggcgcgggaggccctggcggcatggccgggaggccttcaggtgggcggcggcatgacgccggaaaacgcggaggaatggatttccgccggggccagccatgtgattgttacctcctgcctgtttgatgcggagggaacgctgcggatggacaggctgaaggatcttgtttccgcagtgggcgcggaacggctggtgctggatttgagctgccgcagggttcagggaggctgggccgtggccatgaaccggtggcagactttgacggaactccgggtaacggcggagacgctggatgttctggcggaatattgcgcggagtttcttattcatgcggcggatgtggaagggctctgcaccggcattgaccgggaactggtggaaatgctgggaaactggcgccgcctgcccatgacatatgccggaggcatcagccgcattcaggatattgacgaaatagacgctttgagcggcggaaccatggatgccacggtggggagcgctttggatttgtttggcggcggtttaatcaggtacggggatctggtggccaggcagcgcgggaagtccggcatggaaacggtatgaaactggctctgaaagttattcccaatgcgaagaagagcgaggccgtgggatgggaggaagatccccgtgcaggccgcgcgctgaagctgcgcattgccgcgcctcccgtggagggaaaggcgaacaaggccgtcgtccttttcctgtccgcttggctggatattccccgttcctccatcagctttctgcgcggggaatcctcccggctgaaagtggtggaattgccggacggatgcgagggaaaacttgcccggctgctttctgcggaggatgtttccggcgcttaggaaagccgggcggaaggcaggcattttctttatgcgtagaaggggtgcatcaggcgcggtccattacgcgtcaaacgtcatccatgtcttagcaggccgttgacgcatccggtaaaagaatttacattgcccgcatgagcgacgaagagaaagagaaaaacgcggaagcggaagagctggaggcgcaggaacaggtgcaggatgctcctgccgaggagaaggtggcggaaccttccctggaagaggaattgcttaaatggcgggatgccgccatgcgcactgctgcggaatatgataactaccgcaagcgcatggtgaaggaaaaggaggaatgcgccaagttcgccaatcagcgcctgctggaagaacttctacccgtcattgataattttgaaatgggcatggccgccgccagcgcagatgcctcctccatgatttacatcggcatgagcatggtgaagaagcagctggacgaatttctcgccggcaatggcgtgagcgccgtggagcctgtggtgggaagcatgtttgaccacgccacggaggaagctcttcagcgggaaccctccgaccagccggaaggcaccgttctgcgcgttatccgcaaggggtatatgctgaaagacaggcttctgcgcccggcgaacgtggttgtcgcccatactccggaccccgaaccgcaagtctgaccgtttttttaacattcacgccacatggctaaaaaagattattacgaaatcctcggcgtttccaaggacgctactgacgatgagattaagaaggcctatcgcaagctggccttaaagtaccatccggaccgtaacccggacgacccgtccgcagaagaaaagttcaaggagctgggagaggcctatgaggtgctttccgatgcggacaagagggctgcctacgaccgcttcggccatgccgcctttgaacagggcggccccgctgcgggcggcggttatgccgggggagggttccaggatccgatggatattttcgcccagatgttttccggaatgggcggttttgcggatatgttcggaggcgccaagcgcggcggccagaaaaggtccaccaagagacccggttccgatttgcgctatgatttggacatcacgctggaagaggctgcgaagggatgcaccaagaagcttgagattgagcgtctggtgacttgcaagacctgccacggcaccggggccagggatggaaaggaagcgttcaagtcctgtcctacctgccaggggcgcggcatcattacccagcagagcggctttttcgtccagcagtccacctgccccacctgccacggcaccggggaaatcatctcggacccatgccccgtctgccgcggggaagggcgcgtcagggaggattcccacatcaccatccgtattcctgcgggcgttgccacgggcagccagctccgcatcgccggggaaggggatgccggggtgcatggcggccctaccggggatctgcacgtgtttattgacgtcaaaccgcacgatattttccagagggagggcaacgacctgagctgcacggttccggttccgctttccctggctgtttccggcggcaggctgaaggtgcccacgctggaaggcgcggccaccatcaagctgccggaaggaacgcagaacggcatgatcttccgtctgcgcggcaagggggtaaaggcccttcgcagttcggacgtgggggatatgctggtggaggtggaggtggaaatcccctcccggcttaccaaagagcagatggataagctgaacgcgtttgcctctgccctggatgaaaatcggaaccagtcggcttgcgtggagtttgccgacaaggcggcgcgttacctgaagggcaaataaggtccgtttccctttttcagacatggcccgctttttcctcccgccttccgaatgggctgctcccgcctgggagctgcgaggggatgaagcgcaccatgccgccagggttctgcgcctgaagcagggtgactcctgcatcgtgtttgacggttgcggccgtgcggcccacgctgtggtggcggaacctccgcgcagctccggcgtgctgctggttccgggggaggaatgtcctccttctccccccgtggcccatttgacgttgtgccaggctgttcccaagggggccaacatggatctcattatccaaaagtctgtggaactgggtgtttctgccattgttccgctcgtaacggaccgcacgatcgtgcgcctgaatgcccgggaggctgaggccaaaaggcagaaatggcagcgcatcgccttggaggcctgcaagcagtgcggccagaacacgctgccggaagtggcgcttcccgttccctttgcggaatggctgcgcggaggaattccggaaggactgaatattatcgcctctctggcgcccggagtgcggccggtcagggaagtgctggagaccgcccgttcccgttccgtccgtcacgcttctctgctggtggggccggaaggggattttacggaccgggagacggccatggcgttggaagcggggtttgttcccgtcacgcttggccctatcgttctccgggtggagacggccgcctttttcggcctggctgccatgcggtacgccctggactgagttttttcatacgcattcccatgttcaaaaatatcattttcgactggtccggcaccctggtggacgacctggccctgacgctggacgcctccaactacgtcttttcccaatacgggaaaccctgcatgaacagggatgaatttcgcgcggaattccagcttccctatccggactattatgcccgggtgctgccccacgcggatctggatgaactggaagaccatttccggtacgccttccgcgtttccaatgctccggtggaagtgctgccgaatgcccgggaattcctggagttctgccgcgcgcgcggcgtgcgctgctttattcttaccagcgtggacgccaaggagtttgatacccaatgcagggagctgggcatgatggaatattttgaagccattcatgcgggcatccgccataaggatgcccacattcataccctgctggcccagcacgggctgcatgcccatgaaaccgcgtttatcggggacatgcagcatgatgtggaaacggcccaccacgcgggcatcacatccattgccgttttgaccggctacaatgacgcagcgcagctttccaaggccaggccggacatgatcgtcccggacctgcttgttctgcgcatgctgatgcgccgttacgcgctcccttccgatacgcgggattccatcaatatcaatggtcttgaactggataccttcattggcgttccggacgaggagcgctcttccatgcagaccctgaaagcggacatctctttttatccggaggaggcgttgtccggcctgaacgatgatttttccagaaccgtctgttatgattccattgcccgtgcgctccgggcggaggccatggcgcgtccacgcaagctggtggaaacgctggcggaggatatgggaaaggtttgcctgaaggaattcggcgcgcggcacgtggttgttaccctgcgcaagtttattctgccgcggacggacagcgtttccgtaacggtgcatgtttcccggcaccggtaagaaagaggttttctaccggatgtccaccgccttttcctcagggattttcttcccgtctttggtgaaagtgtttttctccgccttgacgtcaccggtatggcgaatgcggatggcggttccgtttttgaggtcaaacgtgtttccggtaatggtgatgttccggtgaacgtccccttccggccgtggagcgtgcggcacgatctggatgacggcttctccgcattggataaaggtattgcgggaaatggtcatgttcctgaccacgccggattcataccagccggaggcgtcatcttccaccaggatggcgggcatgcccgttttttcaaaccggcaccgttcaaccagcaccggcttcctggtggtgagcaggaagcccctggtgggaatgtggcggcataccgtattgctgatgtggacagatggcgtccatgtgacgttttccacaacatcgtcaggttggatgttcccgggattgggatgttgcaatgtaagttctatttccttttcattgagttgtttgacgccggaaacggtattggatgcataaggtaccagcgtgttgcaggaaacataatcgatccggtctcctgcggcaaaggcgtcaaagccgaaggtctggggatgcatgaaccggacggtgattttgttgggggccggcctgtctataatgcgcaagtgggttccatgaacattaacggcgtcgtcatgggaggctcccagcacgcaatccttgacgatgatttttccccggcatccggaaaagtgcagattatccgcccaggaggaattggtgcggagggaacgggggcgcggggctattttcaagtggctgaacatgatgttctcgcagaactgggaaacgacgcccatgccgtgcatatagtaaatatggcagttattccagaggatgtttttgcttctgtattgaaagaagccgcagcagtccctccgggtattgcggttttggtaggattggcccggtttcatggttggtgagccttccttgaacgtaatgctgatttttccgggagacaattctctgatgactgttttcccggggtcgaaacggccctggaaagtgccggaggcggaatcgaaaattttggagtaccctcccatgcggaattcccagccgggtccgtgccaggtcaggtttccatccttcactgtgtacaggattccgtccggaatagttgcttttatggtatccccttcaacttccgtgaccagaaattcccccatggtcggatgcaggtaatcaaaacccaggccgttcagggaaacgttttccgcatgttccatgcagacaaagatggcttttccttccagcaggatgtcggtggctcccggctttccctccaggcgtatgtttttggcttccatcaggcggatagccatggccttgggctcgttgggcgcatcgttggtgttggaaatctgcggttttccagtcatcagggcaccgtgtttgaagatatgcctgccgggcatgaaccggatggtgaccggggcctgtttggaaccttcccccatcagcgccagggagacggcatgttcccccggatggatgacgagcgtatctccccgcgccatgatgagacggttggttggcgccatgcttttccacgccgtggatggggtcgttcccggattgccgtcatttcccttgtccgggtctatatgccagacatggtttcctgcggattgcgtgcgctccgtccgttccggataatccgctgccgggcatggccctgtcaacattgcgagaataaaaagcagggaggccacggggttttgcatgctgcaactcctacaggaacacggttttcgggacaaggataattcttgcagggccgggagaaaaagccgcagcttttccatggttcacctgggaggcccctgtttttcatcctttctgccggggcgggaaagaaagcctaccagcttgtcataatacgctttggatttgtcgtagtaggattgagggtcaatatccagtttggtgcggaacaggagccagagcttgtggaaggtgttgacgcggtagcggatgtcgaaaatacggaagccgctcgccttcattttgtccagaatggtatggtaaatgagcgccatggcctgcgccggaataagggcggctttgtcttccgggctgagaaggttgtattctctctccgcttccgcaaagaaagtttccgccagatccgcttcatatttcagcagctcctgaagccggggggaatacaccctgcagcgcaggtcttccagggtgtatccaaagcggtccatatcctccttgggcaaataaatgcggttggacttgccgcagtcttccgccacgtcccggatgatgttcaccatttgaagggcatgccccagggcaatggcgtacggataggaggcttctcccgcccccatgatgcgggcggaggtgaggcccacgcagcaggctacgcagtaggtgtagtccagcagttcatcgcggctgcggggctgctgctggcagatgtccgaacggcagccttcaatcaggtgcagcatgggagtggtgtccagctccaaatcctggatgagggctatgatgtcctcctccagttccgtcagttccaggccttctccgccgttgatgacctccacccagcggttcaatgcgtcgtggcgttcgcggggagtcatgcccggttcgtccacgatatcgtccaccgtgcggcagaaagcgtaaaattccgccatatggcggcgttcttcttcaggaagatcaatgagggcaaaggccaggttggacttggccttgctggtgatggtttgggcttgagtcatgtcttgacggaaaaaacgtgcctgcgaaaaggataaaaatcatggaataaggccccagtgggaagtaaagggccacaggcagaagctggcggggcctacgatgttgtactggcggacggggccccagtaccgggaatcaaaggaattttcgcgggtggaattgtcccccagcgccacgtattcacgcagataggggcgtttgctgtcgttggacagatgaacggttcccccttccgtgatgtaagctctgccgtccagcaggctcaggggggcgggaagggccacgtagccgcagggctggtaggggggcttgccggaagcgaccctctggatagtccattccgtggctggtttcccattgacgattagctgggagtcctgaatggagagggtatctcccggaatgccgcagaggcgtttgacgtagtgggttcctccttcctggccggtgctgcttcccttattggcgatgccttcgatgccgcgtgtatcaaagacgaagacttcccctcgttccggcttgcggaagtggtaggccattttattcaccacgattaggtccccggcgtcaaaacgggcattgacgattgtgtctccgggcaggtagcttctgaacggggtgtgccgttcggcttcaaagcgcggttcctgattgaggaagtagcggcgcgtttccgcttccgctgccggaatttccagcttggagccgtcatcgaaaatcacgttggttaccgtgagcagaagatacttggtggcaggttcgaaacggacgattttcttttccttggaggccgtttcgtgcacataggagccgccgtacaggatcatgtccccgattttctgcatcagggtgggatccccttcctggggaagggcgcggattccgttcagggagggctgcatggaaccggtcgggatgcggaagggctggactacataacagcgcaaacccaggaaaatggccagaatcacgaacagaacttccacgttttccgccagggcggaaggaatcgctccggggatggattccagcgtggattccagtttggcggtaatggtttccgcctgctgcctgtcaccccggtaaagggccgttttcagcaggtcgcggctttcttcaaactccgccaggcgttcgggaggcagaagatcgcgattgtagttgatgtagcggcgcactgctttcagggccatacgtcctttccggcgccatttgggcgtgaaccaggccagaggatgatccagaagaaacaccagaacggcgtttgcagccggaaagcaatcgtaaagggcagctaggatggacttgtgcgggctattcatgaagtacggcattcatgatgccccgtccggaggcgtcatggaagtttattttacgttacggaagccccatttttccaggattcagcaaattttttgggtccagggcggatttgaccagttcgtgcaggtggtaggcgccttcccccacggctttccggaaccatttggccttcgccaggccgatgccgtgttccccggtaatggcgcctccgtgtgccagcacccagtggaacagcctgtccacacaggcgtccgccagggctttcttctctggattcgcataatcgtccaccatgatgttggtatggatgttgccgtccccggaatggccgaaacacgcgatgtccagccctgtttcccggttcagggcctcgcagaattccaccagggccaccaggcgcgacctggggatgacgatgtcttcgttgagcttggtcattccggttgctttcaggctgtaggaaaattcccggcggagttgccagatggcttccgcctccgcttccgtgtctgcgcgcagaattccggtcgcgccgcattcttccagcagggtgcatagggaatccagttcctcccgcacggcgggccgcctgccgtccacttccacaatcaggtggccgcggcagccggaaggcagggcgctgtcccccagatagttccgggcggcgcggagagtgaaactgtccgttatttccagggcggagggcaggtgcccgctgttcaggatgcgctgcacggcggcagcggccagcgggaattgcgggaagccggcgctgagcgcgccgaatgcttccgggtgggggatgagcctcaaaacggcccgggtgatgatgcccagcattccttccgagccgataaagaggtccccgatatcgaaccccgtcttgtttttatgggtgcgtccgccgcattccactacctctccgctggcaagcaccacggtcagccccagcacgtaagctctggtgactccatatttcaggcatctggggccgcctgcgttcgtggcgatgtttcctccgatgctgcattcctttctggaggccgggtccggcgggtagaaccatcccagagcacgggcttcccgctggagatccgctgtgataactccgggttccaccacggcaacgccgtcttccggggatatctccaggatacggttcatccgttccagggaaaggctgatgcctccgcgcacgggaacgcaccctcctacgtatcccaccccgccgccgcgggccgtgacggggatgttcatggaggatgcgtagcgcagcaacagggagacgtcctccgtactttccgggaaaacgactgcctccggcagcacggaggcgtaccatttgtccccggcgtgcgccgccagcacatccggggctccggaaacttttccaggccccagaatgcgggaaatgtcttctttcaaagacatggattatttgagaatgggggtgcagaagcagtccgggcggtggaaatccggattgccggaaaggtcgtccgccgtagtcaggaaaatctggtccggagtgtccaggatgaacgtggctgccagcttgcagtcgcggatgtccacgccgcgcagttcgtttagcggaatccgggccatggcgcaccatccctcgtccgtcagaatgcacttggtatccacggccagcggagcggggatgtcttcattggcgcggcgggtatcggaaaaggcgcaggcccaccatgcgccgttgggcgcaaggttgaattcccagtaattggtgccgtctcccgcggccatgaaccattccgccaggtcgtaccgccatagctccggctggaactggccgggccgggcttccggatggatggtggctgccttgctgcgggaagccagaaaccagaggaattctccgtccgtggcgaaggcgaattccgcacttggctccacatcatagccgaaccagtcgttgacgagttcctggcggggcagggaggcgagctggtcgaagcttccgttgaaggcccattggtgaatgattacttgcataccaccacatttggacagttttcaggttttatcaagccagaacgtcttacaggcttggatattgacgtgatttctccatcatgggggccgtcatgcattttcaaaggacgctgaatcggttttcccgcgaaaacgttcccaggtatctggctgtgttcatcggcggtttcggggacatgtttgcgggttgtttgagccgtgtggagaaaggatttcccggttttttgccgggtgtggcgtacgcaacggcttattaccactgggacggaggcggctgcggcgtgttttttgacaggtgcggaaaaatagcggtggagctggaagagctgagacggagatatcccgggctgcctgtcgtgttgataggacacagctacggaggctcctgcgcggtggaagtagccaggcgccagtcggttcaggctgctcctctttgcctcctgacggtagatgccgtggcgcgcaggcaaaagagcgtgcgtccggcctgtgtggaatggtgggggaacgcttacctgcaggatggcggcggcttcatggacgcggtgcccagaataggcggacgctggggacattgcgccggggctgatgccaatcttgctttttccggctacagtcgtgaccgggagggccgcctttattctcaccggcgtcctgcgcccatgctttatgagccgcctggggaagaagcatgcagcctttttcaagccgctgcctcctggctggaaagaaatcttccggactgaactgccggagccgtgctaccggttcagttcatcccacttcaccagttgggaaagaagttggctgataaggcattccgtctgttcccgggctttctcttccggcactctgatcttgtccccgtacgtggtggaaatctggaaatagcaccagcgttgatccatgccgtgcagaaccctgtctttcatatccatcagggtgcggatcaaatggtcttccgtcatgtggcggtggccgataaatacgtaataatgcatactgtccagaatgacaggttgcggatggtccggagcgatgttctgctgggatttcagcttggtcattctgatggttccgcggccttccacgggaacatccaccgtggtccccgtcaggttaaaatggccctgggccgggaggcagcgttccggacggtggatggagttgtttaaatcatgaccggatttcacgatggaaacgcggcacagaacgggtacggtttccgtcgcatccaggctgatggggagttcctgcacgtaatccgctttggaaaatcccgtatccggggccaggatgccccgttcctgttcggattcctgcacgcgcgtgccgtgccagccgtacggattcatgcctgtggggagatccatgctgatggaggagtcctgcacttcccccctgcgcggcatcaggtaagtgccgccgagcatgacggccagcagaaaagggatgatgataattttgagcgttttaatattcatggcggcggaaacgcttaatgggacttgttcattttaacaaccagcttcttgcgctgtgacggcttccagatgagctccccggccagcagggagtggacggctgccaggccgaaaaggctgatggggaaaaaaaacagcaggccggaccagtcatgccaggtttttgacgcaaactcgggatttccgtattccgccatcaccacgatgctggtgatgcggacaccgttgccgatgacggccaggggaatcgcgctgaggaagagcacgcattttttccagaatttcaagtcggacaggtaggcccaggctgcggacagcatgagcagtgccatcagggaacgcatgccgctgcaccctcctgcaatattgaaggcatcccagtgtccgccggtagagcggatattggtgccctgcagataggtatccaccccgaagatgcttgccccccaatgccccagctccgtcgcgatgatttgaagccccaccgtagcctgctggaaggagggcagggggatgcacagccagaaaaagagcagcgggaaggcgcacagcctggcggtctgcggtccggccaggtaccaggccccgcccagtaaaatcaggggaagagcgcctacggccacgcgaggctgccccacgcggaaggaaagcatcagaagcatgatcgccgggatgaaaagaatcaggccgcgccagtccatgcgtctgggtgcctgggcaattttctttctggcatggtatagcatgaagacgatgatgggcaccaccagccagccgtgttcataatccgtttgcttgttccaggaggaaatgagccactggatgctgttttcatttccgaatgaaccgaattccgggaatgccagatagttcagcgccagcagcagcgtgctcacggccagggcggcgatcatgggggcggtcagaaatctctctttgccatcaggaacgggggaatccatcatggagaaaaatcaaattgtgagaattaagtattgcgattatgcggacctgtgttcagaatgcgtccgcttttcagtttccggtatgaagattatcagcggtacagcacacagagaacttgcggagcgcattgcgcaaagcgtaggcattcagttgacgaacgtcacggtgaatactttccccgatggggaaagttttgtaaagataaatgaaaacatccggggcaaggatgttttcctcattcagcccacctgccctcccacgaaccataatatcatggaattgtgcgtgatggtagacgccgcccgccgcgccagtgccggacgcatcacggctgttgttcctttcttcgggtatgcccgccaggaccgcaaggaccagccccgcgttcccattaccgccaagctggtggccaatctgctgacagccgccggagtggaccgcgtgctgactatggatctccatgccgcccagatccagggattctttgatattccggtggatcacctgtacgccgcccccgttttaatccgtcacctgcgcgaacattatgttaaagacctcaagaaactggtcgtcgtctccccggacgtgggcggcgtgaaaatggctcgcgcgtattccgacgcgctgggtgcggaattggccattgttgccaagcaccgcgtcaacgccacccatgtggaagccatgaatgtcattggtgacgtggaagggcgcgatgccgttctgattgacgacatgacggaaaccgccggcaccctgtgcgctgccgccaatatcctgaaggaacggggagcccagcgcgtgttcgcctgcgtttctcacggcgtgctgggggacatggcccgcgaacggatttccggttcctgcattgaacgcgttcttacctccgacaccgttcccatggcctatggccccaaagtggactgtgtcagcgtgggagacctgctgggccatgccgtgcagcgcatacatgacggagaatccgtatcatcattatttgacatttagacaattttagtgcagagtcctgcgccctgacctgagtaccggtttacgcgggttcggaaatcccggcggggcctctgcctgaacccgattaggaaacatcatcaatcaacactcaatattgcctctataaaacatggctacatcccattccctcaaggccgaaacgagagcctgcggctccggtaatctgaagcaactccgcagccagggcctggttcccggcgtggtttacggtcccggttttgacaacgtcaatatccaggttgacgcccgtgaatttgcccgcatgctggcttccgccgtttccgaacacatcctcgtggccctggatatcaacggcaagatcgtgaaggttctccttaaggaagtgcagcacaaccccatcaccaacgcctgcctgcatgtggactttcaggctgtgaccgataccacggtcatccattccattgttcccgtcattctggaaggcgattccgccggcgtggccttgggcggcgttctggaccagaccattcacgaactggcgattatctgccaggtgaaggatctgccggaagccattactgctgacatctccggtttgaaactgggtgaaagcctgcgcattgccgatctcaaactcccctccggcgtaaccacggaactggccggggatgtgattgtggctattgtggaagctccccgtgtttccggcgaggaagcggctccggctgctgaagaagctgttgccgagaaataagtttgatacgcctgtttcttcttttaccgggtccggagccgtttttgcggctccgggcttttttttgtcgccaacagggcatcttttggtaaagtgcaggatacgtatttgcctgatcaatctggaaaaagccttagatttatgaacaagtccctcatattggtgttgaccgcattcgttccgcttgcagctgcagatgaagtaaaactcaaggatggaaccgtttacaaaaattgcacggtagaagtggaaacgccggaaagcgtcagcctcctggttcccgtgtccggaagtatcaaggattccgtaaccgtgaagagggatttgattgaatccatcaggaaggcgactcctgatgaactggaggctgcccgaatcggcaaaatgtatgccaaaccggaaaccatgaatgccggggatttggaaaaagccttggcggacctggacaagaccattaagaaaaatccccagggccttgctcatgacgccgccgtcaaggcaagagccagagtagtggttttgctggaggaaaagaaattgacggaggaagcccgggccgcccagaatgccagggaggaggcggaagtgaccgtgcgcaccaaatacgaccatgaggccaataagctgctgaagcgtttcaaggcgcttgccgtgcgcaatccataccaggccatggccgtgtatgaccgcttgcgcgacggttatcccggttccgccgccttggcggatgcctatccggatgccgctagaatcgccggacagctcaaccgtaagctggaggtcatgatcgccgccaaggaaaagtccttggagaaggaacgtgaagccctgagaaaggaggaagagaagcgccggggaaatcccaaactgaccaaggaacagcgccaggtgttgatggatgctttccagaaaaggcagactgccatccgggaacgtgaaaaccagctcacggaagtgtaccgggctttgcgcaagaaggtcaaggaacgcggggaccggtggtttgaacctacggcaggttctttggaagccatgagagaccttaagctggtagccgctacggatgcggaacgcttaaaaaaacaggacccggaaaacggagccggttccgctgcgctggaaaaggcctgggatctgtgtgacgagaaaaaatttgacgaggctatggaggttctgacggaactccgaaccgcccaggttcccagggaatactatgaggaactgacggaaacggtgcgcgtggggttgcgggaacagcgcgcccgtgaacgcgccgaacgtgcggaagcggcgcgcaaagcccgtgaagaccgggataagaaacgccaggaggaaagagaggcggccgccaaggccaaaaagaaataattctgccgttttccggagaaaacgctccggaggaatatggcggaaatggcgtttacggacgggatggatcaagtatgtgttgattccatcctgcccgtcaggctttccggacgttgatttcgcgcaattcgttgtcagagattcctgaggtttttctgtcggagcggggccggaggcgtgttcctttgacggtctgcatgtttttgcggggagaagagggcaaatctttccccatgcgatatttcctgctttcttccgccgcgtcttcagtatagaagtgttgcatgaggaacgcttcttgcaaacgggtcacgggtgaaacggacatcagcatggaactgaacctggacggcacgggatgcgccgccgtcgcaacggggcatgcgttttttgaccatatgctggatttactggcccgccattccctgatggacctgacccttcaggcccgcggagacctggaagtagacgcccaccacacggtggaggatgtgggaatcgttctgggggaatgcattaaaaatgcactgggggacaaaaagggcattgttcgctacggctgttcctacctgcccatggatgaaactcttacgcgcgtggtgatggatttgagcaaccgtccgtatgtagctttccgtattccggaaggcggtttgccggatgcccccaactttccgctgaccctttgcgaggaattctgccgtgcgctggccaataacctgcgttgcaacctgcatgtggaagtgctttacggcagggatggccaccacattgcggaatctgtcttcaagggcatcgcccacgcgttgcggcaggctgcggcgattgatccccgagccgccgggacgctgccttcaaccaagggaatgctgtaaaatacatgaaacttggcgtgattgattacggtgcgggcaatctccgcagtgtgctgaacacctttgaggccgccggcgtgaccggtcatctggtgcgtactccggaagatgcggcgggtgtaacccatttggttcttcccggcgtgggcgccttcggcgactgtgcggaaaagctgcgccgccagaatctggtgcccctggtccgggcatggatagagcaggacaggccttttctgggcatctgcgtgggctatcaggttctttttgaaagcggggaagaaagcgggcaggttcccggactgggcatcctcaaggggcgcgtggttcggttttcagaatcggaactcaaggtgcctcacatggggtggaacagcgtggctctcactgatccctccgatcccatctggaaaggcatggggaaggaaccgtacttttatttcgtgcattcctattatccccagccggaggataaatccctgattgccgcgttctgcacctacggcgtgcgttttgctgccgctgtcaggcgcggcaatctggtcgccacccagttccacccggaaaaaagccagaaactgggcgtgaaactgctgaaaaactttatttccctgtgagccggaaattgccggctcacagactgccgctcttttccctgacagcaaggggcaaggaggagcggtgaatcaaatgaaacgtcattctcgaaaagcagccttattaaaaagacatcgggattaatttcattgaaacccttcggacggcacctccgtagaactccatggcttagtttttccctgtatggaaaatagccagggcaagcggagtggcaaatttatttcttaccgccggttcctggtcaatattgcttaaggggcggggaatatttgttgagcggggggcagaggggggaaagggatggtaatctataaaaaaagaaccgccccttcacggagacggttctttttgataagaaagcaaggagcggatgtttcgtccgcatgggccggattttagccgagcaccttgtaatactgaaggtgaatctggggattcaggcgaaggcgttcgcggatgggcctgatggcggaaggttccgcagagaacgtgtaggtcacatactgcccggcggaaaggtggttggattcgtaggcgaatttgcggcggtcggcgttttccgtggcggtgatgtcggcgccttcttccttcatcgcggcggctacggtgctgatcaactcctcgacgggagtttccgtacccttcatgttgaatacgataagagcttcgtaatttctcatggtcttgtgataattagaaatgtgtcgtgcgaacggtgcgcaccttgcgggcaagtaaggtgcaatgattgccttcagaaagcaagcctattttttaccttgtttccgggaacatgccgtttcctgcgttttactctccccacggcgcggaagaattgttctgcatggcgtttcctgtcgttgtccttagcggaggagggcgggatttccggtgaggaatccgaaaaagcggcagatagaggcggcggagagtttttccgggctttctgtcctgccgcctgaacaatggtgccggttccaaaaaaggatcatgacaaggaggccttggaactttacgccgcagatgaattaacggtgcgttattttttggaatcaggaagaaggagaaagggcttctccctgatgggagtgatattccggtactgggattcacccccggaacgggatggtgcaggtatggcgggaaaaattccggaaagaagaaaaacgttaacgcctccgcgccatctgtacggccagctggaaggcgtggatggtgctggacggattggcttttccggttcccgccaggttgaaggcggtaccatggtccgggctcagccgggggcggggaaggcccagggtgacgttgacggcggtatggaagtccaccagcttcagcggaatcaacccctggtcatggtaaggggccagcacggcgtcatagttcccttccacggcatcccggtacacgcagtccgggacggaaggcccgtcaaatgcagcatccggatggatcgccctcagccgtcccacggccggggcaatgatgttcccgtcctcatcgccgaaagcgccgtgttccccggcgtgggggttcagggctgccagggcgatacgcgggcgcatgattcctttgcggatgcagaagtctttcagcagggttccgatgcggaccagttcctctgtttccagcagggaaggcacgctttggagggaagtatggatggttgccagccccaccgtcaaccgtttcccggtcaggcacatggcgtaattgtccgttttcaggcgttctgcaaagaattccgtctgccccggccagcggaaacctgcctcatgcagggtttccttgcagacgggggcggtgacaacagcgtcaaccgttccttcccgcagggcatgggccgcctgttccagatggtcgaaggcgtgtttggcggattccgcattaggccttcccgggggaagctccactctcttgccgatgaggcggtattccgcatcttccgggagttctccggaggcaagcgcggcggagatgacttccgggcctatgcccgactggtcgcccagcgtgtatccaatgaccggtttcatagtgcggcaacaggagggattacaattccgcgggttccggcattccggcaggggaagcgggaatttcttccgcggggaaaacaggagtttgttctgccggaacagcctgcagggctgccgcccgtttttccatgttgatgatctgtgtcgttttttccggttcgtcggggttgcggagttcagattccaggtgggagttggtggaccaatggtaataaatggtggcgccgagggctgccagcaccagaatcaggagaatggaaccgaagaaggagcgcatgcctctactgtgtcccggaggaggggggaattcaagaaattatcaagaccgcctgcgtgggcgggcaaacgccgttaactgccgtgtatcttcatttcctgaaagaggaaagaagggtaagtaaaaagaggcagcccggcatgagaagatccgggacagttcaggacaggattttcatcgcgaggaacaggagcatgagcaggatggcaaagccgatgattctgcccgccatgctgccgtctttcccgtcctggatgcacatggggcagttttccgggccgttcatgccgctgcatcccatgccgcacgcgccgcagggaaaatccgcctcccgctcctggactcggtcttggagaaggagttccagctcgcgcacggaaggctccacgccgtagacgacgatttccccgtcaatggcgagtgcgggaagcggcgtcccgatttgttccggaacggtctcttcagcctgcatctccggattgacgcccagatgggccaatgcctggagggtattggcgcgcagggtgtttcccgggtaggcccggctgtaaaaaagctgaatcctggtcatggaactgggtatgtcaggaacgcttccgtttgggaagactcttcttccaacaaataggacggggctccaaaggtcaatgcgtttttccgtgtcatgacatataagtgttgtacggaaaacattttagacttttcaaatgaggagggaacgggcactatcccgccggtcccgccatgaaaaagctatctctattccttttgaccctggcctgtgtattccagttttccgcccaggcacaggaacggcccagttacattgccattgaggccaattccggcaagcttcttttcagttccaacgcagaagaaaaaaggcccgtggccagtctttcccaggtagccaccgccatggtggctttggactgggtggcccgcacgcggttgccgctggacactttcattgccgtgccccaggaagctttcggcctccgtgcgggcaatcccatggatctccagccgggagaccgcctgacgctccgggacgctttgtattccaccctgctgggttcggacaatgtttccgccctgactgttgcctcctttgtggggcgtgacctggtgtcccgccggggcggcggcgcccccattgccgcttttgtggcggaaatgaacaatttggcccgttccctgaggatggccaaaacgcgctttaccgctccccacgggctggacgccagcaactccgtttccacttcctgcgcgctggatatggccttgttaggcgtttacagcatgcaaaatccggctttttgctacattgtttcccaagcgagcaggcgcattgaagtgcagtcccagaccaagggcaggacgatgtacgatatttccaacaacaacaggctcatgagcgcttccggcgtggacggcatcaaggcgggcacttcccgcgccgccgccccctgcctgctgctcagcgtgacgcgcaacgctatttcccgccggagcccccaaacggggacggaggtgatttatccgcagcgcatgattattgcggtgcttggttctgcgagccgctattccctcgccagggagatgatgaacaccggctggcgcgtttgggaaaactggcaggcttccggcatggacatgaaggaccccaaggaatttgtccagcttcctgtgaaatctgctccacaaaggagataggaagtagacggggaaggatttttctgctataaggaacgccgaatatgaacatcggtgttttgaatagcgggggtgactcccccgggttgaatgcagttattgaaggtgttgtgggcgcggcttcccgtcgcggctggaacgttgtgggtttttacgacggttttgaagggcttttgtccgaggaaggggacgaacggtttgaatggctgacccctgccgcctgccgcggattgcgagccaaggggggcaccattctgggaaccgtgaacaaaggaaacttcgccatcaaagtaggcgtggaccaaaagggggcgattgaacccgcggtgctggaaaaaacgaaggctactgtccgtcggctggggctggatgccctgatcgttgtgggcggagacggctcccagtccacggctcttttgctttccgagatagggctccccgtagttggcgtgccaaaaaccattgataatgacctgggcgcaaccgatgtcacttttggcttctacagcgccgtttccattgtttccgagtctttggaccgtctggaaaccaccgcgaacgcgcaccagcgcatgatggtggtggaagtgatgggacggcatgcgggatggattgccttggaaggcggcattgcagggagtgctgatgttattcttctgccggaaattcctttttcccttgaaaacgtggtggaatgcatcaaggtgcgcaaggctgccgggcagcgggaaatcctggtggtggtatctgaaggggcccgtctggcggacgaactggtattgctggatgaaaagacccagggggaagttcgcctgggaggcatcggcaaggtgattgccaagaaactggaagaagccactgggattgaaacccgctcctgcgtgctgggccatatccagcgcggcggttctccctgttcctatgaccggattctgggaacgcggttcggcagttatgccgtggaactggtggaaaagcgccagttcagctgcatggttgctctccgtgggacgcagatgactgccgtacccattgaggaagctgtgaaaaccttgaagctggtggatcccgattgccagctggtgcgcacggcccgcgatttgggcgtatgcttcggggactgacgttctccgtccgcgtcacgggaaattgattgtacccgatagggttttgattgcctttcaaccgtatcctggaatcaggatacggttattttttgcggaagctcgccgtattcattggggcctggcgagcttttaagaagcatcatggacaggaagaggatggaaagcagatccatcaggctggacaccattcccatgtagtccagataggggtccatatcctccgggaccaggcgcagcaggaaaatcagcaggaaagtgacgatgaaaataagaatgggaatcaggatgaattttccgctcagattgctgtcatgcaggcggcgcacggcgaccggcagattgaagaggatattgagccccgccacggctgccagaagctccagggaaagcatgctcagctctccggattggtagaaaaagtaaaaggtgggattgaagcaggagtgagccagcaggatcagagcatcttgcggatgggcggcatataacaggatttggagggaaggagagacataaaaacccgccggctggctgtcaacgtctatcatgctgtagcccagcggaaggaacaggaggacggaaaggaggaaaaaggaccagaattccgtccgggacgcgcggcctgccaccgtattcaatttccgcaggctgatgagccagtaaaggtaaaacggagtcaatggctgctctttcagttctccggcagggggatcagccggttggggctccggacggcggctgtatttgttgccgtccgccttgctttctcccagcgtcagataaaaaaagatcagatgccccagcccgaagggaatgaaaagggaaaaaagccagaggccgctcctgcctgcatcatgcaggcgtctgaacgcggctgatatgcttgggatgaataacaccgcccacaggaggatggttaaggcgtctccgtagatgctcagtcttgtatcagggatgtgcagccagtccgtcaggatataccccgccagggctggaatcagcgccaggaggggaagagccatgaaccaccagaattccgcacgggaagcgcagccccgaaagtccgcataatgaagaaaaccttttttccagcaggagaggggggaaaggagggaagatgcctgcgtggaggttggaggaacggaggaaacagcaggagaagcaggagaagcaggagaagcaggagattccggcatggatgaaaagggggtttccgtttagactccctgatgccggggaatgctcaatgcgtctgtgcccaggacatggaaagttccctcctgcagccggttcagatcaggacaatcgccatcagcagcattccggcgatgatgcccatgatggaaatgtgatggtgtccccagcgttccgccatgggcagcagctcgtcaaaggagatgaagaccatgattcccgcgacggaggcaaagagaaccgcaagtacggtaggtgtgaggaagtggaacaggaagaacatggcgatagccgcgcccaccggttccgccagaccggagagaaaggaataaaaaagggcctttttacggctgcccgtaccgtagtaaagaggtaccgccacggctattccttccggaatgttatggacggctacggccagggcgatggaggtgcctaaagtcagggagtccaacccagcggcaaaggtggcgattccttccgggaaattgtggatgccgatggccagggcgaacagaatgccggaccttttaattcgggatgaggaaaattcaccgctggcctgtccatggatgtcttccgggccgcgcgcttcgtgcgggttttcgtcttccggaaccaggtaatcaatcagagccgccacggcaattcccccgaagaaggaagcaatggcgatccaggaacctgccgtatggccttcgaactctatcaacctgtgctgggcttctcccagcagttccaccagggagatatacaccatgactccgccggataatcccagggcaaaagtaagtgcctttgtatccgtccttttcatgaagaaggcgatgaagcctcctatgccggtagcaagaccagccagcgtggtgagcaggaagacaacgaggatgtgatcggcggaaaggtccatgcgtgcacctgccgggcagggatgaccccggcagtaaagaaaggggtgtattattttgcgggagccgtgggaacgatcatcttcgtggcccggatggcgccggggggaagggggggctcttcccccggcttcaggaggccccgttccttcttgatttcaggcagcttgtccagaagtttgctgaacgcttttccttcaaaactttctgggaggagcgcaacgccttctttgagaggctgttccaattcattgaccctgttttgctgcatgagcaggtacactttttgcatgagaacagcttgtttgacttccggaagaagcccgttctttttcaagtagctgtccatgatggaaagcgcttcatcaggattttgatccgccagaatgtggatgtttttcttccggaacgtatcggcccattccaatttctgggcatggagcagatcgtccctgtgcagtttggcgagaattccggaagcgtcctgcgggtccagtttttccagttctgccagagccggcttatagaaagtgcggatgctggattggggaaccgttttcagcaattgaaccagcgtgtcccgccgctgctggtcagtgagcttttccgccagcttgtttgtcagggactgctgcgtgttgagtgcttccgccgctttttttgtatcctgcatgacctgggcaggattggcgtaacctacgacggtgtggatgggccgcccctgggcatccgcaaacaccagcgtggggaatccggtgatgccgtaggattttttataggtttccagagaagtttttgtctgcgcgtcctgctgctttttacgtgggtagtccagttccacgggaataaaggaacgggaaatggctgtctggatttcaggaagggaaagagcctgctttttctgcatgatgcaggctccgcaccagtcggaaccggtgaattccagcattactcccttattctgtgcggcggcttgctgcatggcttccgcagggctggtactccatgtttcggaggcgccggcactccaggcgaggagtatggctgcgaggggatgtatgattgttttcatggcaggaatgtcattattgcatggggggaagcggagaatgggcggggggaacccacatgtttccggaagaggagctgccggaatctccggtgtgggtaggtgtttcaattttcggttttccggcgggcgggtccagatcttccaccaccactttctttttggcgggctggggcacgggggcggcagccggggccggtgagggtgccctgcggataacgggggatttgagggaagcatccgtctggttcatggccgtaatattcagcgggtcgccgtaggccagcatttcccggatgtcgtcaggaagatctccggcaggaatggaggtgcttccctgttcgtgcatgatacgcacgaattcattttccacgcgggtgatttccacattcaaataagttttgcctgaatgggatgtcttcagaatgtcgaacttgcggccgcgtgccttggctctggcgtgttggcggtagcgttcgaagtaggagcggatttctccccggatgccggctacgcgcattttctctttctcaatggatttttgcgtctcttccaggtcggaggccgtatgttcaaagatatccaaaaggctgagcagctgttccttgggagcggtcctgttccgtatttccctgagctgttcctgcttcttcagcagctgggcatgattgtcctccaaagcttcccgagcatctttgacagggtctggaagctgggaaaatttttcataaacaatatagccggcactgatgacgataagggcgaacagccccaggcagaggttccagaaaagagcgtctcccctggctttccgttcggaatcctcctgccgggcggattcttcttccgcagcgtgttccgagacgacgtccagggaggttttcagacgttttttggctgcggggacggagttttcatccttatgttctcctccgttctccttcggagcaaagcgggtttcgtcttccgcaggggggagagtttcgccggacggctgtctgggagcgggggcgtcggtcatgggatgcgcgggaatggaggttagtctaccgggtgggtttgtttgaattcagccagtttggccgcatacgcgttatattgatattgcagggcatggaattcctgcttgcgctgcgccagcgttttgcgcatgtcttcaatgtcaaagcacaggtgctcgaagtcgcggcgtttggaaggcaggacatctatatccttcaccgtgaagggcgtcgtgattcttcccgggttggaaagccttttctgaagattgtaattaacgcgggcatcgtgggattccgcctggcttatttcctgttccgtctgggccagtgcgtttttcatttgctggagctgggcctggagctgctggtgttcctgggatgaattccccgtcaggaaggaggtcagggcttcattcgtactgctgtcgcacgaagtaagggccagcgtgagggccaatgccggacaggtacgcctggtgaatctcacgatgttgaacatgccggggattatgaaccttaacggaggggaaagtcaaactgttcatgcgccctccggaacaatgatttttctcgcataaaacgcgtatgcggctacaatgcccgcggcatgatgcaattatcggagatcggaggccatctgacggccagaacgggtattgatgatttgatggaggatttgttcaaggccctccattcgggagacgcaagcctgtgccagttgaacggcgggagccccgccgttattcctgaggtgacggaactttggcggcgcagcatgggggaactggtgcgaaatggcaaatttgacgtgctggtgggccattatgcccatccgggcggggatcctgcctttatccgtgccctggtgtgttttctcaatgaacgttgcggatggaacctgacgccggaaaatgtggcgattacccagggcggccagatggcctgctttacactgttcaacatgctggcgggcccgtgcccggacggtgctgtgcgtgaaatcctttttcccctgtgcccggattatgtgggataccagtcccaatccctgtgcggcggcgtcatgttccggggcatccggcccggcatccgcatgctggacgggcacacgttcaagtacgtgattgattttgaccgtctggacatacgtccggaaacggccgccgtctgcatgtcccggcctacgaatcccaccgggaacgtggtgacggatgaggaattggggcttctgcgggaaatgacttcccgcgccggggttcccctgatgattgacaatgcttacgggcctccgctgcccaatatttgttttgtgcccgtaaccccggcctgggatgagaacatgatcctgaccatgagcctgtccaagatcgggttgcccggaacgcgcaccggcattgtcattgcgcgcccggagatcattcgtgccgtcgtgagcatggtgactacgtcatccctgtgcccgaacaatctgggccaggctctggtgacgccctatctggaagacggcactctggagagagtctgccgtgaaaccctcacgccgttttaccgcggccgggcggaattcgccctgtccctgctgccggaacttttcggagaatccatcccctggcgcgttcataagagtgagggcgccatgttcctgtggctgtggtttgagggattgcccatcacgtgccaggagctttacgaacggtgcaagtcacggggctgttttgtaaatcccggccatcactttttcttcgcccttccggaggagggggaaccctggccgcaccgtcatgaatgcatccgcatcagcttcacccagacggaggaactcctgcgcaaggggctttccatcgtggcggatgaagtgcgcaaggcctactcccgttcttaatccaaacctgacccgtatccatgaacagcatgaccggtttcggcagagacgccgcccagacagaccgttataatatccttgttgaaatatcaggcgtaaaccgcaaacaaacggaaatcgccgtcaatgtgccgcgcggctatgcggaatgggacgcctccgtgcgttccatcgtgcagggggctgtttcccgcggccgtgtaggcgtctccatttctgtggagcgtctggaggaagcggatggctccctccagcttgatgagcagaaactggcctccttggcggagctgctgaaccgtgcgtctgacctgacaggtcaaccgttgcccctccaggcgtccgacctgctgaggctggatatcgttacttccgcagcggaagcatccctttctccggaagaagcgtggccgatggtggaaaaggcgctcaaagccgccttgaaggattttatttccatgcgtgcggcggaaggtgccaacctgaaagcggacgttcttggcaagctggatgtcttggagcaattccgcctccgtatcgcggaacatgccccttccgtgcctgtcaggcttcgggaggccatgctcaagcgcttggctgatgccgacttgtccgtttccgcggacgatgaacgcatcatccgggaagtggccctgtttgcggacaagtgcgacatttccgaggaaattacccgtctctcctcccattttgaccagttccgcaccttgtgcggttcctccgctcccgcgggcaggcctctggatttcctttgccaggaaatcttccgggaattcaacaccatcggctccaaggcgaacgattccacgctggcccatctggttgtggctgccaagacggagctggagaaaatcagggaacaggttcagaacatcgaatgacagccatgaaacagccattgggaacattgctggtggtatccgggccttccggttccgggaagacgacgttgtgccgccgcgcgacggaaaacggtctgtgtgtgtacagcatttcctgcacgacgcgccagcccagacccggggaagtcaatggagtagattaccatttcctgactcccgccgaatttgacgccagggtggagcggggagactttctggaatatgcggaggtgcacggcaaccgctacggtacgctgaaagcggatattttgactcttctggaacaggggaaaaacgtggtgatggatattgacgtgcagggggctgggcaagtccgttcctgccgggagggcattctacccctctgctatgcggacgtttacatttatgtgccgcaggcggagcttaaaaaccgtctttgcggacggcagacggatggcgctgaaaccattgccctgcgtcttcgcaatgcggaacaggaagacgcctgcctgccgcagtaccagtactgcctggtttcctccgaccgcgagacggattatgcttccttttgcgccctgctcaaatgccagtccatgcgggtgggactgatgcggtgataaggtcttgcctgtttatcgagagactgcgttctctcgtttcgtcccccgtcgcatggcatccgggatggcggctccggttccgagacatttggaattggttttcttcccgtgcctatatggtatgtgataccctttcctctgatccggcctgcgtgaaaaaacgcgggttgaaattcttgacgggcaggatactcataggctctttgaataattcaatgttgaaattatcctccaggcaaaggtgtcccggtaggtcagatactgccccgtttccttgtatccgttaattgcctttttgactaaaatgtttgactgtcagttgaacgtggatggatgaaactactgtttcccgttgttctcttcttaaggagaaggataatgtaaaataggagccctgcttttagacgaaacagggatattgttttttgttcccgtgggaatgatggcgcctttgaccgggcgcttgggtttcctttccgttgaccgggccttccaaaggtattatcgctctacttgagcggatacaaccagccgatggcgcaggtaaaaatgacccagaggagcaggttgagggggagtcccactttgacgaagtccttaaatttgtaaccgcccgcattgtacacgtaagtgttggtctggtagccgatgggggtggagaagctggcgctggcgccgaacatgacagccagaatgaagggaatggggttggcgtcgaattgcagggccatttcataagccagaggccccatgacggccgctacggcattgttggagatcatctccgtcaggatagagcagatcaggtacaggccggagatggcgaccaggcaccccaacgggcctatattatccactacgccgaaagcaatggctttggcaagcccggtcttgctcatggcttctcccacgcacagcattcccagaatcaggaaaataatgccccagtccaccgcctggtaggcttccttcggcttgatgcagccggagatgatgacgatgagagctccgatgtaggcgagatagaagggattgaagcgcgcgaagaatttgaaaaattccccgtattgctcaaaggagcccagcaggccgataaaaatgaacagccccatggccaggatggcccagccctgtttgctgcggttgtgcgcttccgcgggacgctggctcagggggatgatgcgctgcttggtcaggatgcggttcattccttcctgcggtccttccagaagaagcgtgtcccctgccgccagcttggtgttcggccccatgtccgtgatgtttttgccctgcctgtggatggcgagcacgaagatgttgaatctctggcgcagcttgagttcggacagggacagcccggcgaattcggaattgttggcgatcatgccttccacgatctgcacatcgcgctgctccagcgtttccagcccgcggctgtcatcccagcccagatccacgcctttggcttcccgcacctggttgacttttctggcgttgcacaggaaaagaatgcggtctccttcttccaggttgatgtgctgcagctcttcctgcatggagaatcccctgcggcgaacttccacgattttggtgcccagcaactcggtttgcatcaggttgatgggagtggtgccgatgtggggggaatccgcgggaattctgacctggagcaggaaatcgcgctggatgccgcccggaagcatggtggacaaagtggggcgggatggaagccatttgcggcctaatgtccagaggtagagcaggcccgccgccgcataaatcaggcccatgggcgttaccgtgaacatctggatgccgtcataacccagtttctgcacctggccgagcacaactacgttggtggatgttccgaccacggagcaggtgcctcccagaatggtggcgtaggagagggggatgagcagcttggaggccgcgatgttatggtcccggcagaaggccagcacgatgggcatcaggatgacgaccaccggggtgttgttgacgaagggggaaaccatgaacgctcccagcgtgatgaccagcagggcggtcagttccctccccttggctaccttgttgaacagtttggaaaggtctcctattaatcccgttctttccagggaagcgctcagaatgaacatgcacactactgtcagcggtccgctgttggcaaagctggacagcacatcacgcgtgctcagaattcccgtgagcatgaggacggcggtgcctgtcagggctgtgatttccacgggcatccattccttgataaagctgatgaataacaggaccagcagaatgcctacaatccattgctgggcggccgctgattccagccagcctatgacggaggcggagttgatgttgagaagaggaagcatggtttgaaagttgaaggtgtggggaaagggtccaactctcctactttcccggcttctatctgtcaagccgcaataattttccggaaagggtttgaaaaggttcctgcgcttttttattgttggtgcgccgcatggattcccccataataacaaggtttgctcccagccctacaggcaatctccatctggggcacgccctggctgcgtgggaagcccgttccctggcgaaccgtttttccgggaagtgcgtgctgaggatggaagatatcgaccagacgcggtgccgtccggagtttgttcagggcatattgaaagatttggagtggctgggcatccgctttgacggtcccatgatggttcagtcttcacgcttcagcgcttatgaacacgctcttcagacgctgaaggaccggggcgtgctgtacccctgtttctgtacgcgccgggagattgcggaggaggtggccgccatgggtggggcgccgcaggggggctgcgtggacgtatatccgggaacttgctggctgcttgacaaggggcgcaggaaagagcttctcaaatccggcaaacctttttcctggcggctggattgccgtgctgcggcgcggattaccggtcccctgctatggagggacatgcggttcggagatcaggtctgtcgtccggaagaactgggggatgtgattctgggccgcaaggactgcgccgccagctaccatattgccgtggttgtggacgacgccgcccagggagttacccatgtaagccgtggtgaggatttattccctgtgacgggcatccaccggacgctccaggccctgttggggcttcctgttccgcagtggtatcatcaccggctggtgaaggatgcttccggcaagcggcttgccaagagggacaggagcctgagccttcaggaaatgcgtgccgccgggatgcggccggaagacgtgttccgactgatgcgggagagctgagggattttcattcccttataggcgggggggcgttgttccgccgggaaaggcagggggcaggctgtggcttgcgtttttccagcagccggtcggatggttttctttccgatgcagagcaggcatgcataagccgccgccagggtcagcaggagaagggagctcaggatggccagcagattcagatgccccagcgggatgagccatgcgtgcggcatggctgccgttcctgccagtatctggggaagccagatgaaggccgcctgggaaaacaggctgacggctgtgaaggccagccctgcggccagggtgagccataccgccggaagtaccggcaggaatgtttcatggatgttttttttcatggcccgtgccgttcctgcgaatatggaaacgagaaacaggggggccagcaatgcggcggcagggagggtgtcccaaaggagccatgtgcagaggggggagacggccgtcaggaggcccgtgctcttaatcaggaggccccggggcggcggggctggtgccgcggcgtggttcatatatccgttaatcgggccagacattgccgggcgtgcttccctgggtaatgacgacttcctggcctattttcagggtgaagtttggcgttacttcctgctgtacttccacaagttcgttcgtatccttgagcttgacgcgcacgcggatcattttgacggcttccaccctgccgtccacgatggagcctgtggcggaagccagttttgaggtccccatgccgatgatgccgggagtcatggcctccgccgccgttccggccatgttggcaaaggtgccgtcgtccgtggaggtaaggacgttgatttccttgatgcggaccacgttgcccagcttgatggtcgtcactttgccggtggcgatttccagattgcttttttgggtgcaggagaaaaggactgggagaataagaaaagcgggaatgaatggaaacggattcatgatgaacgtagttaactacgctggcggggttaagcgtttttcagcgtgtgggaagaattgtgtaggtagccagatacaggagcaaatggagggaggagagtgccagtaccctgttcatgcggctgtccgcgggcgttttgcggattaggagcatcagatacccgccgaagaggatggagggtatccacatccaccacgtatgggacaggttcaggtgaagggcccggctggatgtgggcagcgtgatgtaggcagccaggatgaaagactgggccatggcgcgcgcctttccttcccccagccgcacggccagcgtgcgcttgcccgtagtgaggtcttcctttctgtcgcggatattgttgacggatatcatgacggcgcacaggaggccgcattgaatgcctgttacgatgccggcattgtacaccgcaagcgattccaccagcgtgccgggtacgacgggcgccgtgcctatctgcaccagaatggttcccagtacggcaaccagtccgaagaagaggatgacgaatatttcccccaggcccttgtaggccagcggccacggccctcccgtatagccataggtgaagtagagggacgggatgccgatggcgaggatgggccagccgcgcagttcgataaggggaaaggccagaaggcacgctcccagcaggaagaagaggccgatgagcatgactgttctgtgggagagggctccgctggccgtcatgcgcacgggcccggttcgccgttccgtatcggcgtgcttggcatggtcaatggcgtcattgaaaaaattgcaggcaatctggaggcacaggcaggaagtcagtgtcaggagggccagggacgcattccagctgccggtcagtttctgcaccaccatgcagcctgcccataccggaatcagggaggcggtgagcgtcttggggcgtgccgccagaaaggcggaagtaatgatattcatgtgagggaaggctccgtaatcagcggaggatggggccgaggcggcggagggtttccttaatgagtgagacgtgccattgcccgggggccgtttcctcttctcccaggtagccatataccaggcaggaacccagttgagagtaaagcaggcgggagacgggtcccatgggccccattcccatgacggcgatcggccccttgggcttggtgaaaagctgtactcctgtctggatgtccgaggccaggcagggcgtgaatgcaaatttgacgatatccgccttgtaggagcgcgcctttttttcctgttcgcgcaggtaatccacacccggagtgatttggaaatcatgggtggagccgatgatgatgacgtcccgctcccgcgcttccataaccagttccctggcgtggcgcatggccttgatttcaatgtccatggcggcggcatacggcatataggcccggagcagggcaaagcgctcttcttccgggatgcggcgcagccctccttcctcatggcagcgcacggtgaccagcaggggcatctccggccggaactccataacctgttcagtcgtgagttccgggggaagggcatccacgcgcagttctactagatcgcactggtctgttaaatcttttcctttcagcgttttccatagctcccacgaggtaacggacgcaacgattttcggcggataggcctgatgttcacgtacaagctgctgcatacatcctactatcccagcaaaggaaggaaggtcaatcttctattgatgagttccacttcattttggggccgagtatgtcagttcgcctgccttttccccttttggaactgtgtttttcttcctgtgccagccctgttggccggtttcccggcagacggattgacggatgttggcgcaggctgccgttcaagatgcaggcagggctgtttcgtatggtccgtttccttgttgtggcggagggcgttattttcctgcctctgcacgttaaaaacatgttgagaatggaggttcggcttgaaaagggagttcggagggagctaggtgaaggccatgaatatgctttggtcaaggttattgcggatggggaggaatcccttttgggcggctttggatgccgtgctggtggtaaggacggaaaaagattcgtccgggcatccggaatggtcctggaaggcgtatgtccctcatggcgttccggttcatgaattgcctccggtgcccgttcctcttccggaaggggattgggataaggagcggtttcgtaaggaaagacggaaagctgcccgggtgttgggtcaccaggccgctttaacgctggcttcttccctccatttctcccgtttcatgattgtggaggaagagtgccgtttcaggctgccggtaataggttccacggcgcggatgcttgggcagctgctgaaaggctgccgggaaagaactgctctgtttttaagtgagccgcgtttgtctccccatacggcctgctccgtggcgaaaggagaaaaatccatcctgctgcgcgtgacggatatggcggcatcagctgcgtatgtgatggacctttccttatgtgaacgcattcttttatctcttccgtcagatcagcgggtctggccatggctgaggtattatggttctctggaggaatggtttgcccggtatctgggacgttatggtgatttatatgctctttcccctgcgttcgtttcctgcggagagggcgctcccatgccctccctctgcaaatccctgggccatttcaataatgcacgcaccaaatatacggatctgtcttatctggtgaatccggcggtcaattcatggcgctggctgaaaaacgtgaacattttttccggcagaaaaaggcttgggtgagaaccccgggatgcgttttgctccggtttcgccggattaccgtttgcgggggatgaacgcctgcatggctggggctgccgccttacggcagagcttgaaataaggtgttccgtgcgcccgtcatctcaaaagcaaaaccccggaccgcaggcggtccggggcggctccctttttccggagggaggatgccgtgatattagaggggttagctggctccttcgtcgcacaggatcttgacaaagccttcctcctggaggcgggtggcaccgcaggcgaacttggcccggatttgcagggcttcctccatatcgtcgcgcacggaaagcttcactttgaaatcattccatatgccaaactgggccttgctctttacccaggccaggcaggaacggactccctcttctgttttgggaagcctctgggtgcggatgaatttgaatcccatgaaggtgtctattttcccttccaccagggcttttacattgttgaagtcataactgctgacctccgtttcccgcagcaggttcatgatctgggaactggttaccgcaatgacgagctggtctccgaactgcggggcatcctggttccaggcttcgttttcctcaaaaagctggagggctgcgcgtagcttggccacggtaaggttgctggcggatttggtgccgctgtccacgtgatccacggctatttgctggctttccttgaatggaacggcggtcatgccgtcttctcccacgtagttcgtatccaggaagccggagatcatcacgtcgtccatgcggcggcctgctgcggcctggagaccttcaatcgtcttgctgacgggaaggtccatgtctcccaggcgggtggcgtcaaattcatcgtagccaatggctttggtgaacgtgcgcggccgcatggaccggcgtgtggtgggagcctcgttcaaaacggtctgccccacccgtgtggttttttccgtgaagtccagaatgccgaattgatccagaaatactaccttgccgctcaagtcgcgcatgacgctgacatacttgtccagccgggaggcgtgctgctggagcagggagccccattttctggtgtattttacctgataattatcgctgatagttactgccatgattgcaaatataatgatagtttgaatgcaggaacggcaatttggattatcgggtccggaataaccggagcggtcctgccgcaagcgggatgcggctatgtcccctgcgggattgcgggccggtcccatccagcgctaacgtgtatggactacaagacagaaaagcgcaccacggcagaatcgtgatgcgctgtataaggaatgaaagactccgctttcccgctgttaaagaataattgcgtgcggccgtgtagcgtgatccgggccgaaaagggccagcatgcggcccgtttgccctttttccatgcggtaggagtaaaaacgtttggtatccgccgccgtgtccagcccggaatcatgaatctgttcttccggtacccccgcttcaatgagctgtgccttaatggccgtaggaatgtcttcctcataatgaggcgggcggatgcagggggaaatgacggcaatcaggttggacggttccaccccaaggcattttttcatggacttgatagtgttggaaacgatgttgccggcggttcccgccttgcctgaatgaatcagggaacggtggcagttttccttgtcgtacaaccacacggcggcgcagtccgccacgtaaatggcaagcacgcagtcggaaactccggagcaaatcaggccgtccacgccttccacaggataattggagccgatgtcccccaccagggcaactttcgtgccgtgcacctgttcggcgcggcgcaggtctttccaccgccagcccagggcttccacttccgccttatggtacggttccagccgttccagcacggtttcgcggtctccggtgacgtctactcccggaattctctcaatgaattggacgatttctccgggataggactggataggcttcaagaatgctggcgtttccataattgatggatcaataaatgtcgttggggacatcttgtcgttttgtattacctagtcgagcaaaatttggcgtaaaatgtcacggacgccgcccggtgactgagaaaaggtttttttccgcctttccggagtgatatgagcaattcatgctgcgcaggtattctttactttccactttttttgcgggaatggccgccgtgtttttttcctttgctgcctccttggcccaggaggcttccccggatgccgggcagttgctgaaaagggtgcgccagggggcaactattcaggaaaacaaggacattaaggggcaaatacgcaaacgcagcgtcaaaattcccttttccatgagtctgcgcggcaatctgatagccttccagtaccagctcaataatgtctggaacaggttcgatctgaaattcaaggaccgcggccaggagatcctttcctggaaggacgggaaagccggtgttttgccggttgcccagtatgcggtgcccattgcggggacggacgtaacgtacgaagatctttccatgcgctacctgtactggccccaggcaaaaattgtccgggatgatgcggcgagcaccgtcaaggggcgggattgctggattgtccagataccgaatcctaattccggggtggggcaatatgcctgggtgcgcgtctggattgataaggagaacggcgccatgtggcaggtggatggcattgaccgccgcggggagctggctaaaaggttcatgattgattccgtgatgaaattgaaggacggatcttggtttttcaaacggatgaaggtggaggtccgggatccttctaatccgcgcagaacggtctccgtcagctacatagatatggacagcccggaatagccttccggttcccgttccattccccgcggagctttcggattattctttccggggcatgggggcggattccttttcatgccgcacggatggatgatttaggacgtgacaagaaggcgggatgggcgtaaatcctccaaaaacctgttatgaagaaacatttattccttgcatgtgccctggcgttcggcatgtccgcctgttcccagcaccaggagcagtaagcggagtccggttctccggtgaaaacgaccatttctcccgtgactgctcccgggaaaaagccggaccggcaagccgtgaaattgcctcccaagtccgttccggtgccttccgtaagcccgtcctataataatactcctctttccccgcgcattccgggggtaacggtcaaccgtgtggctgtgccggacaaggtggtggccctcacctttgatgacggtccccatggaacgctgacccccagggtgctggacatcctgcgcgacaataacgtcaagggtactttcttcatgcagggctgcaatgtgaaggctcatccccaggtagtgcgccgcatggtcaatgaggggcatgaagtaggcaaccatacatggaatcacgtttatctgagcaaagtgccccgcgaaaaagcggaatcccagctccagagcactaatgaagccatccgcaacgcctgcggcgttgtccccgtggtcatgcgcccccccggcggctatacgaatgcaggcgtggcgtcctgggcccgccagcgcttcggcttcaccacggtcatgtgggatgtggacacgaatgactggcgcaagcccggctcctccgtggtggccgcccgcgccgtgaacggcgccaaacccggctccatcattctggtgcatgacattcacgcttctacggtggcggcggtggacgccattgtgaagggattgaaaaaccgcggctatgaactggtgaccgtttccgaacttatcaggagaggacgtgccgccgcctaccatgctccttccatgcccgcggctcctgctgttccggattcttctcctcttgccgttccctcgattgtggctcccgcggagcctgttcccgctccggcggagacggtggtcggcatgtaatccccggtgtttttccttttcctttcaacccggtttccctgcggaaaccgggttattcattgcctttccggagcatttttcccaccgccccggaaaggaggctttccccttaacgggcacacgcacagaaggcttgacctgctggtgaatttctccacaatcctttgccgtattattcacacccaatccggattgaaatgtctatgaatctcctggcatctgccgatactctacccgcacctggcggaatgtccgctcctctcgccttcatctacgatctcttcaataaccctcttttcatcttcattggcggtctggtgttgctgggtgtgtttttctggtacctgggttccgaccaggacaaggtcaagcgcaatgccggaacgattttcattatcggcattgcgtctttttccctgttctccctcttccagcaggggttgaaatacggcattgacattgccgggggcgtctccttcacgttgagcgtggaaccgaatatcggagacgacggcaagcccattcccctgacggaccaggccatggaacaggcatgcgtgatcctgacggaccgccttaacagtaccggggccaatgacgtcattatccgcccgaagaaaaaagacaacctgaatcttatagaagttcaaatccccgctgcggatcctgccaagcgcgaggaaaccaaggccatcctgaccaaagtagccaagcttcagattcttcctgtccacccgcgcaacaacgaactggtggcggagggtcgcattcgcgttcccggctacaggatgtatgaatataccttcaaaaacggcaagggtgaggacgtcacggaaaaaatattcctggaaaagcgtgaatcgctgacaggcagggatatcgtgcgcgccggagtggatctggcccgtcccggccacgtcaacgtcaccctgagcaacgaaggggcggacaagatgtataacctgacttcccgcatgcagctgggccacgaccgcatggccattgtgctggatgatgtggtcaagagcgccccaacggtccaggccattctgtcgaaaagttttgaaatcagcgggctggatgctcccggagaggctgaagccctgacgaaggtgctttccaacccccttaccaacaagctcaattttgagtccgccagtgaaatttccgcctctttggggcatacggccctccttcagggggaatacgctggcattacgggattgatcctctgcttcatcatgatgatcatctactaccgctttgccggtttggtggctatcatggggctgacgatcaatgccctgcttcttctgggagccatgtctatcttcgggtttgagctgacgctgccgggtattgccggtattgtgctgactctgggcgtggcggtggactcgaacgtgttgatttatgaacgcctgcgggaagaaaaggaaatggggcgccccttccgcgtggctatccgcaactcctttgacaaggcgttctccgccatctttgactccaatatcacctcgctcattaccgccgtcatcctgtactggatggcaaccggcaccatcaaggggtttgccgtcacgttgacagtaggcgtcatcacttccatgattggggcgattctcgttacccgcgtcctgttctactgggcggataccgtcggcatgatgaaggatcttaaattcctcaacctctttaagaaaaagacgaacatcgacttcatgagccagaaaatctggtcctgctctctttccgccattctgctgatgatatgcattgtatttggcgccgtaaagggcaaggattgcctgggcatggactttacgggcggttcttccatttcctatctggtgaacaagggtgacatctccttccgggaagtggaaggcgtggtcaacaagctgtccctgacccagaaggctacggtgcaggaggtggcggagtccacggacagcagcaaagtgaatattctgattaatttttccgaccatgcccaggacaaggaggctatcaccacggcattggacaaggcgtttccggttctggacaacgctccgttcagtgaagaaaccatcgggcagtccatggggtacgatacgctcattacttccgcatgggcccttttcttcggcattctgggaatcatggtttacctgacggtgcggtttgaatggaccttcgccattggtgcggtcatcgccctgacgcatgacgtcctgctggtgcttggcctggtgattgtcagcggaacggagctgaatgttattcatattggcgcgttgttgacggtggcggggtactccatcaatgacaaaattatcgtatttgaccgcatccgcgaattcctccgcttctccgacccgaatgaaagcgcttcacaaatcatgaacgaagccattaaccagacgctttcccgtactattttgacctctctttccacgctggccgtgctggtgtgcctgtacttctttggaggtccttccatggaagacttcgcctggacgatttccgcaggcattttgattggtacgtactcctccatcttcatcgcttctccggcggctcttttcttctcccggaagcatgggttgcatgaagaagtcagacaggccatgaaggccggagcctgaggtttggcgttgagccgttaaatctctgaccggggaaggctgaatgccttccccggtctgtttcttggaaagagaggggggaaaggctctgtatggaataacctccgtgttcttttcccgtccgcctcgttcgcttttcctgtttccaccatatgcggctacggcttccgcatggctcttctgtctcgcattcctccctcttttatttcaggcataagaaaaccccgcctgccgttaggcagacggggccgtatctctggtttcctgctatgtatttctgcgggtgagattattcatcatccccttcctcctgtgccggggcgggagggggaggcatgtcgttgttgccgcgggctgcctttctggcttccctgcgtgcttcaagagccttggaagcgtcagcgttgagctgagccatttcagcctcattcaattttccgtccttgtcggcgtcatacttttcttcaatcaggatccatccggcagccatgatcggggcgcggttggggtcaagctggggacggggaccgttagggcggttgccgcgggggccccggttgccgtcttcacggcgtccttcaccgcctctgcggccttccggtcctctgggagcgcgggggccttcagctctggggcctcccggacgcctcggaccgtccatgttgggcattcccggtcctttggggccaccgggaacggcatggtgcgggccgggctggccgtgatgagggggaatggactgcaattcttccggggagagcttcccgtcgccgtctttgtcaaattttttgatcatggcggcggcgtgggcttcctggcgggctttcatttcttccatgcgcttggcagcttccggatggttttttgcccaatcttcccgcatggctttcttttcctcgtcggaaagcttgccatcgccatccttatcgtacttcttaagaatttcggctttcctggtttcctggcgggctttcatttcttccatgcgtttggcagcttccggatggtccttaagccattcttcctgcatagcctttctttcctccttggaaagcttgccgtccccatccttgtcaaatttcttcaggatggcggctttcttggcttcctgggccttcttgacgtcggcttgcagaacggctatttcctcgtcggaaagctttccgtccttgtcggtatcgtatttggccaataccagttcttctccgacaatcataataccgggatcgattctcttcatctgaactcgttttggcccctggcggtctctgcctccggcatggtggcgatgacctccccttctttcaggggggggctgcatttcaggagcatcggaaggagcctccggagcgggaggcggcggagcgtcctgagcgaacgcggaacatgcggcaaaagccgcggcgataatcatttgcttggtcatatctttgaatggtgaggtttgatgcgtttcggaaaggagcgtgcgctgcggtgtttcaaacaggcggaaacgtctccctttgctaaaaggaacccctggaattcattccggttgcaaaataaaaaggcaaatgcgtcggagagggggtgcgccgctgtttttatgacacctgttttcttccggggtaaagaagggtgaacccattgaatatgaaggaaatcagtgagggaatacagcaatcgggtgcgagtgcgtgccgtccgtgtcatagcggaaaaaattattcgccggaaataaagcggatgtaggcctgccaccactggctgccgcccagcagccagatcagagcggcgctgagaagagcggggccaaaggggaggtttctgccgaaccccatgcgtgaggcggcagcctgtacaatccccagcagggagccgaggaaaaggctgaacagggcgccctgccagccgcacgcgcatccggccatcatcagaatccaggcgtcgcctgatcccatggcttccctgctggcatggatatccgtcagatttccctccacgctttccagtctttccagaagaaaaacgtccccgttttccatctctatcctgtcgtaccgcagcgtgacggagcaggcagggtgcgttttgccgtcaatggtgacggaacctccggaaaggacggccttgtccgtagaccggtggaaaagcatggaccagtcgtgaggctggccgttgacgatgagctgaagttcctcccgctcggattccggttccctcaaactccacggggcgggaacgtcaaaatgctgtttccaggtgccgaacagaagcttccccaattcaatcaccagcctgatgaccgcataccctgccgctcctcccagcacggatgccgtgaaggcgtccgtccaggtcatgacatggctgtccggcaggaggaaagggtaaagggcgcaggcccccgttccggccaaggcgccgataaatgcctgagagcggaagacaatcagatgttccgcgtcaatgaacatgatgacaatggccatggcagtccacaggcagagcaggacggctgctcctgtggaagcgtccgcgtatttccagccaatggccgcgaagagcagggccgtgagcagctccacaaagcaatatcggaagctgatgcgcgttccgcagcaggcggatttaccccggagagccagccagctcagaaccggaatattcaggaaccagggaatgggttttccgcattccgggcagaaagaacgcgccggatcgttgacggagacgccccgcggcatacggtagataaccacgttcaggaaggaacctatgcaggcccccatcaggccgaaaaccacgggaatcacccatgcgggaaaggcgtcaggcatgggtgggcggggaataggttcggctgggcgtctggttgatgcggtcaatcagcagcctcagcctgccgtagttgccgcgtttgatggggaagacgagccggggcaggcggtccaggtgtggttcgtccgcttcatccggcagggggccgctctggatcattttccccccaggcagaatcaggtctgaaaagtcccgttccagatgttccacccactgggcgggaagctgcgcattcagccggatgacgatggaatctccgacaaaacggtaggagtggaaaatccggtaaaaacggtcgatgtgttccatggcttccgccggatttttagtgacatggatgagatgaagatcgtctgcggaaatcagtccggaatccaccagttccacgcgaatgaaggccagccagttcagccagaaggttttgccgggggaatccagaaggacgatcgggtaaatggtcgcttttcccgtctggatcagagtgagcgtttcaaacacttcatccatggttccgaagcctccggggaatgccaccatggcgtcgctttccgccacgaagttcagttttctgacgaaaaagtaataaaaattgatgagtttgtcgctgtgggccaccacatggttggaggtttgttcatacggcagggtgatgttcaggccgaaggagcgttgttctcccgccccttcattggctgcctgcatgatgcccggtccgcctccggtaatgaccatgtagccgtgttcgctggcttccctggcgaattccctcgccgtttcatacgccggttcgtcattcctgatgcgggcggagccgaagacggaaatcttgcggatgtggcggtacggggcgaaaacgcagttggcgcggtacatctcccgcccggagcggatcaggacggtaaaatcatggtccgaggcggcggactgggccatgttgattcccgttttgatatactcttggaggtagcggggatcgtgcctggtggaggctatttcggaaagctttttaacggcgccttccagagtctggtagctggaatccatggacatggtggaggggcgtttcttgtcttcacctgtaaaatccctgttgtccaaaaaatcaggatgcttcatgagttggtatgataggtttgccctactatgccagatgacgtacattaagtcacagaaaatttaccggcgggcatgaaaagagttgattgttgaaaacagatcgttacattgctccccgcacgggcgttcccacaacatgccgttggtccttcaggcgcattggccgccatgtccgtgttgaggggaaacccggtacattacatacgattatgtcggaaaacgaaaccactactgcagaagaaaccgccgttaccacgctggcccgttttgaggttcccagccgtctggaaaaaattgaagatccgaatgatgcgaatcatttgacctttgtggcggaaccgtttgaaaacggttacggccatacgcttggcaactccctgcgccgcgttcttctgggttctcttgaaggcgccgccattacctccgtccgcatcgccggtgcgcagcatgaattttcctccctgcccggtgtggtggaagatgtgacggaaatcgtgctgaacctgaaaaaggtcaaattcaagcataacggcaaggaaccgcgcctgctctctctgcgcgtgcataagcagggcgttgtgactgctgccgatattgccgacgacaccgtttaccaggtggtcaatcccgatcaaatcatttgcactctggaccaggacaccatgttcgaatgcgaattccaggttcgcgtgggccgcggttttgccaccggcgatgaaaacaaggtgccggatatgcccatcggcgtgattccgatcgactccattttctctccggttacccgcgtgaagtattctgtgcagaatacccgtgtggggcagatgactgactacgacaagctgatccttgaagtctggacggacggccgcatcgcccccgcagacgccatgctccaggcttccgccattctgcgccatcacctggacgtattcgtcaactatgacgacaagcaggtcaactttgaggaagctccttccgccgtccaggacgaggaaacggcccgcctgcgcaagttgctcaacatgagcgtcaacgaaatcgagctttccgtgcgtgccgccaactgcctcaacaatgccaatatcacgaccgttggccagcttgccatgaagagcgaaagcgaaatgctcaagtaccgcaatttcggcaaaaaatccctcaacgaaatcaaggacaaattgctggaactgggtctctccctgggcgttcaggtggatccctccctgcttaccggtcccgtgccgcaggccaagccgcgcctgggtctggaagaggaaagccccgtgggcctggcagacctgattgccgccaacatcgaagacgacgacgactaaatctcacaaaaccaacacacatagaaaaatatcatcatgagacacggtgtaaaaacctccaagcttcagcgcaacgcttctcaccgcagggctctgctcgccaaccaggcatgcagcctcatcctcaatggacgcatcaccaccaccctggccaaggccaaggccctgcgcccctatgtggaaaagctgattacgcttgccaagcgcggtgacgtgcattcccgccgcctggctaccgccaccattcataatacgaccgccgttaagcggctgtttgatgaaatcgctcctctttgcgcggaacgcaagggcggctatacccgcatcgtcaagctgggccagcgtctgactgattccgcccttgtggccatgatcgaaattatcgatctgccccgtgaggctgccgaaaaggaagaagctcccgccaccacggaagccaccgcctaagacgcacctctggaacatcctgttaataccccgctccggccttttgtgaggccggagcggattttttattggcaataaggaagttatggcgataatatcgctcttgcttctttcctgccggaacgttataatccagctttaactatggacgcagtattattgttttccggacaaggtgcccaaaaagtaggcatgggcaaagatttgtatgaccagtatcccgtcgccaaagccctgattgaacaggcggacaaggcgcttggagaatccctttctgccgtcatgtttgaaggccccggcgaagaactgacgcgtacctgcaactgtcagcccgccctctacgtacatggccttgcctgcctggccgtcttgaaggagctcgttccctccctgaatcctgtggctgccgccggcctttccctgggggaattcacggctcatgccgctgccgggacctattcttttgaagaaggcctccgccttgtccagaagcgcggcgcgtttatggaggaagcatgcaacgccacgaaaggcactatggccgccatgatcggcggcacggatgaaaacgtcattaagctggcgcaggaatgtgacgtggatgttgccaatttcaattgccccggccagacagtcgtttccggtacggaggaaggtgtggccaaggctgtagcaggggcgaaggccgctgactgcaagattgccaagaagctcaatgtggcgggcgcctaccattcccgtctgatgcacagcgctatggtaaagctggcggaagaactcaagaatatttccttcggtacgccgtccatgcctgtttattgcaattatgaagcccgggtagtggaaggtccggacgacatccgcagcatgctggaacaccaggtatgcggatccgtgcgctggacggcttccatgcagaagctggtggaccagggccaccgccttttcattgaactggggccgggcaagacactggccgacatgatggctcgcatctgcaaggaagctacggtcatctccattgaagacgtgcccagcctggaagccgccgttgcggagctgaacaaataatttccctgaataaaagggggtaagccgccggcccgttggggagccggcggttttttgttggcgtgttcatggcggggttctgtcaaataggcaatatcccatggaacaggggaaatgcctgcctccgtgccagcggccctgctcctgcgcgggcattttcctcatgccgccggtgggaagatgcatgaacatcagcatcgttcccatgaaaaaagcgatggcgggcacgaacagcggtttccatataaggaaaagtgcgggcatgatggaatgcgccgctcctcaggtcagaagaatcagggcaatgaggtaaaacaggaggccgcttttaggaggcaagcaggagagcatgaaagccgaggctctgagccgcgccaggcgttcctggcggcgcagccccctgcatcaggcatgaaaggaattccgtcaggaaacaggcgttatggaatagaaattcctgatttctaaagaagttccgtcagagagcggatgatactggtcgccagggaaaaatccgcctgctccgttaccctgtttggaaccgagatgactggcattcctgcgcggtgtgcggctgtagtgccgttctgggagtcttccagcaccaggcatccagacggagatttacccaggttttccgcggctttcaggaacagggccggatccggtttgacggggaggccgtcgtcgcggcagacgacggtttgaaaatagggcatgatgcccaatctgttcagccagccgtccacccagcggtgggaagaactggaggccactcccataggggttccggcttcccccaggttccggatgagttctccggcgccgggcaggaggccggcatgttccagatcccggacgatttcctcctggcggcggctgttgacggtttcccagtcgaaagtgcgccccgtcaatttctccagatgttctccgggattccagtgggtgtaaccgctgcccaggcattggttgaacaaatccaggggaagagggtggccgcaggacgcgaaaacccgttcccaggaggaataaatggcatattccgtatccaccagcaatccgtcaaaatcaaaaatgacggcgtgtgcccgccggagcagttcacgcgctttcagaacggcttcccgggaatcggcaaagtgatcaggaatggtcatggacgggagtctttttcaagcctctcaataattccgagaagcttctgtgagccagcttggtttgaaaaaggcggatggcgatgatggtgtagataatgttgggcatccatgctcccagccaggtggggaggtagcctgcggaggccagggtggggaaaaactcatacaggaacagcatggctgccgccaggaacaacgcaatgccgatgccggacatggcggagcgcctctggaacgtgatggcggaggggatggcaataaatgtcaggataatgcaggaaaatatgcgggcgatcctgacgtgccattccgtctgcaggcttctgaggtacctggcgtttgtcgtgccggacttgatgagttcctggagggccggggttccctgtgtatccacgcggacgttgggtgaaatcagttgccagggtgtttcgggataatgctctttcagcgtttggtattcctgtccggcaaaaacgggaacatcatggagctggcggggttcctcctgggaataatttcttttgatggcctgccggaaggtccatgtcctggaggccggatcccaggtggcttcatcggcaaacagctcgtatttcatctttccgggggcgctgaactgttccacccgcacctgccggaaaggattgccgggggaatcaattccgggaggattgcccagataccagatgcgggattccgcatcatttttgtagatggtgctctgggaagcatggttatttttgttctggctcagggaggagaacatcagtttcctgtacagggcggagttgggtgcccagtggaacccgaagatgccgaagtagatggaggcaaagacggcgccgatgatgatgggggtgttgattcggagcagggaccgtccggactgcagcatgccggtgatttctgaggatgaggaaagtttggtaagcgcccagagtgttcccaggagaagggtataaggcagaatcaggttcaggatcatgggcagctggctcaggtaaaagcggaacgtgcccatgaggggtgcgtccaggttcatcaggtctcccacattgtccgcaaaatctccgataatgtaaatcagcgtcaggatggccgtacacatgatgaaggccgtgaaccaggtgcgcgccacatacttgtccaggatgctcgaacggttgtacaggaacattcccagcgcggggagaaagcagcccagaaggatgagccagggccgcaggagctgggaaaggggatattcggacggcgtaccgggaatttcccattgcatctgggaccattcccggggcatcagaaaccaggctgccgctcctcccagcgcaagcaggaggagaaatgcggaccattggcggaaatgtcgggcctggattgccatgaaaaaagagggtggggcaagaatgccagatcgggagcgggaaataaagcgttatttggccgccggacagggataaaaggctgcctgaaccgcatgtatgtgcttgcttcgtgaacctcagtgcggttccgctccttaaagggaggaagtggctgcgggagatgttccgcctgatagaagttggctgttgtcaacgtaaactggatgagataaaatcttcctgacaactgtttcccggcaacagcctttccatgttcaaacgtcttgttcaattgtttcttctgttttttctggctgctgcgggtgttctggcgtggtttgcttggtacgtctccactcccctgctcattcccgtgggaggggaggaacccgcctcttctcccgttgcgggttccctggtgatggaacccgtggaagccgtttcatccgatggcacggctattgaaggttatctggtgagcccggggcgtccggaggctttgtctccgcgccagagccgcgtgcgggatactctgaaattgcgcgggaaaatgccgcatttggaggcaaaaccggagctggttgtgatagccgcctcttggaatgagggagtggaaagttccctccctctggcggaagggctggcaggagccggttacacgagcctgatatggaatccgcgcgggaagaacaatacccgtcaattctgcacgtacggattaagggaatatgcggatgtaacggcgcttttggacgccgtatcccggaagcagggcggattgcctcccgtggctgccgtggggcagggatttggtgcggccgtgctgttgaaagccgcgtctgaagatccccgcatccgctgcatggtcagcatggactgctttccttccctgaaaaccgtggctgtccgggagatggagcaggattggggcaagcctctgtgctatgccgcttattggctgctggatgccggggtggattggcgtgcggggttcagtacgtttgacgtggctcccgtggatgatgccctgaaattggattatccggtcatggtggtttgtacgaaccaatattttttctccacgctggaagattgcctgagcatttacgattccctgaaaaatgagaaaaaacagctttatgaatccatccgggaaggggaaccgtatggcacccgggaacggactttcctgcattccattgaaggaaagaagggggaaaaatttgaaaaaatttataaggtcaacgtctatgcgggggatgacgagctgcaggctggcattgcggaatggattcatgagaatacgcgtatgcccatgcccagggtgttgcctcatgagtcttacagtgcgcccgttacgggtaccgctccttccggttcatgaattgttcctttccttttgctgatgatcccgtgagtgcgaatcaggacaacaaccgagaactccgcgaaaaccgccgcaggcgcagccgttttattctgcccgcgcctcgccatctggcagctgtggcggcaggggctctccttgccgccgtgctggtgcattacctggggtttatcgttctgagctggtttgatctgggcattcatgtgcacaaagcctccgccgtccaggaggacagaaagcctctgcctgaaaaaatagttctgaaggcggacgaccgtcctgctccggatgtagcggaagccgttgaaaaaccggatattgagcaacttgaagagattcccccggaattgccggatttagaggatatgcttccggagcaggtagtgattgctccgggggaaaccagcttttccgcagatccggtaagtccttcccccccggaatccctttccccgaaaatgccgcaggtggacatgaatgccgtcgcgaaggggttgcccgaaccctctccgcctgagatgctgaaatcttccgccagtccggttacaatcaagacggctgaaccggatatggtgaatccggatgaatggtataacaataagctcaaaggggcgggcggtcaggatgattcccatttgccggatgggagcaaatctctttcccagctcatggcccagtcctccttgggcaaggacagcgggtacagcaggctgggagcggatcttctttttgaatacaacaaggcggtgatgaaaaattccgccaggctgagcatgcttcagcttgcgggactgatgatgaaaaatccggatacgattttcattgtggaaggtcatacggacagctttggttccgaggaatataatgccgtgctttccctgatgcgtgctaatgccgtccgccagtggctgaaggataacggcatagctctgacgcgcccgaatggggaatgcagattgtacatacgcgcttgcggctcttcccgtcccgtcgtttccatcaggggggaccgggatgcccaggccgccaaccggagggtggaaatccacatgcgcaagccgggagaggaaatacccgccgggagcctgccccttacgtatgcggtggatatgagcacccctgtcgcccgccaggtgcgtgccggagtgggcgcccgcgccgggattccctcctccgcggcagaaaggaaagcgccccccgcagggcgttcatcttctgcctccccggaacgccgggaaaatcctgcgctgcgtcaggaagtaattcctgaggcggaacccattccggaaacgattccttcggcagagcctgtggaggaacgcatcccttcggcagagccggtagaggatgacatcccgctggctgaacccgtcgtgtgtgcggggagccgcgccgtagtgaagggaggtgccggattgagatggaattgatgcgtgtccttccggtccgggcgctgccgaaacccgaacggctccggtatcttttctcctttgattttgacgatactctgttcactcttggaggccctgcggaagaaaggagcatttttttcagaaccatgcgcatgctccggtcgcagtatggtgttctctggggcgttaatacggggcgcgaccctgtctacctgagggaaggtctggcggatatgttccgggatgatgcggaagcgtttgccccggattttacggtgacgatggaacggaatgttcatctggcggatgcggagggcaggctgatgcccggcgccgcgtggaacgatgactgcgctgttgcccatgacagcttgttcacccgttacggcggcatgctggaaacattgatgggccagctggaaagccggttttccgggctgggacttcgcaggcaggacaatgacgctttttccctggtggtggatgatgcctgcggcctggatgaagtttcctgcgtcattcaggatacggttggtccgtatgaggaaattgtcacgcaaagggcaggtccctacctgcgtttcagccaccgtgattacaataagggaacatccctttcctttgttgcctcccggttcggcattccgtcttcccatgtcgccattttcggcgacgggcacaatgatctggacgccatgcggcacttgccggaggcattccggtgctgcccttccaatgcggcgcaggaagtgaaagacatggttgcccgcggccatggatacattagcccggaaccgcgcacccggggcgttctggacggcctggcacatggagtgttcccttatttcgggatgaaggcggaggttttgaaggaggatatttgaaaacggagctttcggatgctgacgggagatcggctttcaacatgtttctttcatcaaggcgctcccggaaggggaagaatcgtattgacaaggaatgcctgcaatgcagaaatgggaaagattctttcccaatcccgattacatgaacattccctctttttcccgtagcgtttccagaggttccgccgtgggctggtttttagtgttgctgctggtttgcggtgccggagccggatattatctttaccaggataacctggcaaaaagaaaagcggcccaggaattgaccgccgaacgtaaattgaaggagaagaaggccagggaagctgcggagaaacagcgaataaaacgggaacgggaaatcagggagaagaaggaaaaggaacggctggcggcccagaaggcttatgaggaagcgcaggaagagaaggcgcggcaggcggcggaagcggcccgtaagcttcaggagcaggccgaacgcgaagaacgggaaaaaaggagaagggaggagctggaacggcgcgaacgtgaggaagaggcccgcaggcaggaggaagatactcctgtggaggaagagcctgaaccggaagggcgttttccccaacccgtgaaaaaccggatgccggagctttccgtttattctattccttgcagggatgatatccagacggaaaaagacaagctgctggaaacatggtcctgggacaaggcggaaaaaatggagggtatggaggaattccccacgggttcctctccgtggaaaaaagggaaagacgccggacgcatgcaggcgcttctggaaaaatgccgggaatggaaggatgccaaacttgcctcgctgaaggcgtgcccggcggcgaaggattttcccggcgttccggagaatggggcccagacggtcaggcggacggtggagatagattccaatattggaggctggcatagtacgggactgtatgcgccgcccggggcggaaatttcgttttccctgtccggcgctcccaaagacggttcgatcagcgtccgcataggatgccatacggacagccttcataagctggatgaatggaaaagagtgccggaaataaccatgcaggttccggctggccgtgggcgcgtgaaaatggtgaatccgatgggcggccttgtttatgtgaatgtaggccagcgtcccagacggggaaaggtcttcaaggttcagatttccggagccgtgccttcacctctgttcgtaatggggaagaccactccggaacaatgggccgaacaattggaaaataccaaggccccgtggggggaaatccgcatgccccggcttattgtcacgatgcccgtggaacagctgaaacaatgtccggatgttcagaagacggcggaatttctgcaaaaaaacatggctcttcaggactggattatgggatgggataccaagccggaccgcctgcatcatccgatgcgctttgtcgtggacaggcagatatccgccggggccgggcattccggttatcccgccatggccacgaaggactggacgaattccattgccaccggttccatcatccattccggaagctggggtttgtggcatgaactggggcataaccaccaatcccctccctttacgatggaaggccagacggaggtatcagtcaacatattctccatggtgtgtgaagtgatggggactggaaaagactttgaatcctgctggggcggcggcatggggccgtacggcatgagcgcggaaatgaaaaaatatttttcaggcacccagacttacaatgaggctcccaacaaggtgcagctcttcttctgggtggagctgatgtactatctggggtttgacgccttccgccaggtggctcttcaattccatgacaagccttatgacaacggcgaactgagtgatgaaaagaaatgggaatgggtcatgaacgctttttccaaggtcacgggaaagaacatggggcctttctttaagatttggcgtacgccggtttccgaacgcgctacgggcagaatgaaagaccttcccgcctggcttccttccaaggattatccggcctgttataccgcagaggaataagaaggttctggaacagggggggaggaggcgttgccgcactcgcttctggacggttccgtcggctggggctaggatggcggagctgtgaaatggctgaatgactggctgggctttttcaagccccttcaggtgcggaacctgcaaatattctggtcagggcaggcttcggccctgattggaatgtggttgcaggtgacggccatgggtattcttgtgtacgatatttccggaggctccgccacggcagtgggggtgttggctgccttgaacgctcttcctttctttctgggcggcatgctgcttgccgggctgggggaccgttttgaccggaggaaactcctcatagccgtgcagtgcgtccagtggctggtggctgtagccctgtttctgctgactgtgctggatatgctccagctgtggcacttatacgccgccgggctggtgatgggcgtcaatcagacggtgggttttcccacacagcaggcttttgtgggagacctgataccgcgcaagcaattacaggaggccgtgggcatgtattctctggtatttaatacgtgccgggctatagggccggcttggcgactacattattgcggaatggggcgccggaaccgcctttggcggcaatgtggcggcaagccttccgctggttggctgcctggttgccttaaagggacgcgttgcggatacctccgctcccagaaaacagcgcggcgcaggaaggaaagcgtccggcctcaaggcggtgcttgccacgcgcagcctgcttttcatcatgatcagcgctctgattcagaatatctgcgggcaatctctctatcagattgttccggcattgatgcacggaaatcccaggaataccggcctcattctgggtgcggtcggagccggagccatggtgagcatcctctttgtcctgccgtttgcacgcaaaagcgacagggtgggagccaagctttcctcaggcaccctgtggatgggatgcgcactgtgcgtggcaggcgtcatcccggtggtggaagtgcaggccctctgtttcttttttgccggtttggccacttcttccctctttgttacttcttcatccgccgtgcagcttctgtcgcccccggaacgcaagtcggccattctggggctgttcagcattgtcaccatcggtgtgcagccgctggcggccatggggtggggagctgtggtggatgcttggggtgtccagatgacgattgtcgtggcgggggggctggaagccttgttttccatttggatgctgggcgttccattttggcgtcatttcaaattttctccggatgattgtccggagacgacatagcgccttcccttccatttgcggcaggggaaggctgtcggtcctcatgctgcggggaaaaggggtgcatgtagggtttccccccccgcggataattccgggatgcagcaagccagggaagaggaagcaggttttggaaacgtcaggagcaggaaccggctgttagccgtccgtttctgcctcgtgttcggaatagctgatgcccagcatgcagatatcgtcggcctgattggtgcagccggtaaatttggctacgcaggtaagggcctgatggacaaaatccttggtgctgtggggggaggaattattgaaatagtcaatcagcctttccacgcccatttcttccccgtcctggttggctgcttccgtcaggccgtccgtgtacatcaggatgcgggaccccgccaggagcgaaaactgggcattatggtacgtagcgtcatccagcagccccagggcgattcctttgggcagcggcattttgcgggcgattccgtccggtcccagaatgatgggatgcggatgcccggctgtagaagccgtcatgaccccggtttccagatccaggtaaatataaacggcagaggcaaacatggtggtgttcgcccgttgcaggattttggcgagctggtggttgagggaagtaaggaaagccgccgggttatccgccaggtgggacaactgttccatcaggccgcggagcatggaggcgatcagggcggcgcggatgccgtggcccatcacgtcgcagacaatggcgccgacgccggaactgcctacgggaaaagcatcgaaccagtctcctgcaaccccctccgaaggagtgaaaatatggtgaaaatccgcatggcgggtcaggccgtgttccgtatgggagcgggagggaatttcgtagggaagcagggcgaactggatttccctggccaaatctatttccttttccagagttctgttgcgttcctccaggatgcgggccgtttccgtggccttgatttctgtcttcaccagtttggtgacatcactggaaatacctacaattccctttagctctccgttgcgtccgtaccacgggaacttgctgatctggctccaggaatcatccttgtggagccatgtctcatgatgaaggcgggcgcggatggggcgtccggtaaccatgatgtccatttcctccttgcgggaaatatcggacatcgtttggtcaaaaaagtaatcgtccgtgcgtccggtcaggtctgccggcgtcggtacgcccagcttattggctgtggcggtattcgccaggacgaaacgtgattcccggttcttgaaatagatactgtcgggaatgtgttcaatcagggtatgaaacaggtccctgtcctccgcagcacgcagttccgccgttttccgccgggtaatattgacccatacgcccaccagcataacgggccggcgctgcttgtccctgcgggcgaggccgttgacgcggacccagctccagcttttggagttcagcttcttcatccggatttcaatgcgcatgggcacatgggagtggccgtccagataacggcgcacttcttgggaaaaaaaagcctggtcttcctcgtgtatggtaagctccggctgggtgaagatattgggggctttctccttgcggctggcccccatcatggtcaggcagcggtccgtgtaatgaatgacgcccgttttaatattccagatataaaatccttcttccgccgccgccagggccattttgattttgtcccaggtaaaaactctctgggcggaatgtctgttgcgtgagggcggcattgcagttgcccttaatctaacgacaaaaccgctgtcttggcaagaggcaaaataaaggaatcctttctgaaaggaggcctggccgggggaacgcgtatgaaggacaccggctggtttttaagatggactcctatttttctttttccttttcctgggattgaagaaattgcagttctttcttcaaagcgcttcctacgcggtgctttgccagatagacctgggcaatcgtgacgccgagctgcaggcggaccttagccgcgtcccactcccgcaggacataatagtcaaaaatctggaactgcttgggcgacacttttgctttgacgcgttccagagccgcctgaagaaggttattctgccattcccgttcccatacctggtcaaaattattcttcccttcatccgggattttgtcgatggggtgttccagggtatccgtggcatcagggttcatcagcatggccgtgtcctttttccgcttgcggaactggtcattgatgcgccagcgggtcatgttccatagccagagtttgaaggaaccctgttccggtttgtaaatatttttcctgctctgcttggcgatggaaagaatggtttcctgtaccacgtcccaggcctcgtcttcccttaatccggccttgagggcgacggaataaataagccgccaatatgtccggtaaaattcatcccaggtacgctggtcttcccagttttccaaacgcgcgatcaggcttttcctggtatgttccgcgtattgggaaagtgtctgctcgtcaggctgggactcgttatggggttgcaatgggggcacattcatggtttatcatgaactacggatggaagtgaagcgaaagccgagtaataggccggaaaattctgcacggtccagcctgttcattcactacgtccgtcgtggagaaaatctttcagggaaacggacatgatcaggaaaacgtcaaaacgcaggggaacctccgtcattgcggccctgattgcgttgtgcgcggtggtggggtacggtttgacggagtgggcgtcgctggataatgaaccgcaggcggttccctcccgccagagggaagagcggcagacggttcgggagaaggtggaaatccccgacaagggggagcccgttcgtttgctgaccatgaacgcaagcaactactttgtgccggaagacccgaggagaagcaattttcaggtaaaatacaagcctgtggaagcccgtgaagccgtggcggagctggttcgccaatcgggggcggaaatcgtggggctgtgtgaaatgggcggggaggctgccgttcgtgacttgcaaatgcggctgaaaagaaaaggagttcatttgccgtacaaagttcttgtcatgcgggacggggaggaccgtggtttggcccttctttccaaataccgcatcgcggatgaccgttccgtaacggacatgcctgtatccggagaggcgaaacggaaaaagacaatgctgcggggcattttggacgccacggtcagcatgccggacggacggctgttccgcctggtgggcattcacctgaaatcacgcctcagccgtgacggttccgcagaggacacacggagaagggaagcctacgccctgcgggactacctgaatgaagctcttgcctctcaggacggcatgcctctgcttctgtacggagattttaatgacggcccgtcagacagcgccgtgcaggtcatccaggggccggccaaaacggaataccgcctgaaccgtttgaagcccagggattctcgtggtgagacctggaccatttactacgaagacggtgacacctaccattccttcgaccatcttttcctgaacaatactctgaaaaagcgcctcggccgcaagcctcccatgggcatccttgactctcccccctcgctccaggccagcgaccaccgcggcgtgtgggtggaattaagataagcagggcctgatgttttttcagcaggggagatggaaagggaaaaaatgaaggctttggaaaaggaggacaaaaaattcttttcttgtcgttccggccttatccttcttgaaatgcgggagttggaccgaccggatgtttttcttttccggaaggatggcggaagcagggatttccgcatggcgattccttgccgggattttgttggacaggaacatatcaggcattccagttcctcaaaaaatgattgccgtgtccgtctgaaacgggtagcatgccaaaaatcgttgttcaatcctgcatcatctgtatgagatatttttccaagcattccggaatggctccgcgctgttcctcgccggggagcaaggggtttaccctggtggaattgattgttgtcattaccattatggttgccatgatggccttggccgccagcatgttgaggggcgggggcagggggcaggggcttcaggccgccgttgaaatggtggacggcatggtgcaggaggcgcggctggatgccatgggcaaaggaacgtggagccgcctgattattgtgagcactcccgatgacgaagcccgcaatatgcgcactttgggcgtgatgtccaaaaatactcgcaccgggaaatggcatctggtgaaccgtttgcagactctccccgccggtttttacgtcagtccggcctacagcacccttctggaaggctcgaagaaagccagaggcgagaaatccacggcccgcggttttgccagtcgtgacgggcaggataccgtcaaccttcccggcaacagaatgacggatatttacttcattgaatttgacgaggaaggccgcatgtcccagccgaacgcccccacccgcctggtggtggttgccggttccgccggaaacggcaaggaggagaggccaaccccgatggtggacggcaaaccgggcctggcaggcggcattgtgatttatcccaaaggcaatatcagccgtctgaggacgacggagcaggtgattcccaattagtttctgtgatataatactggatttcccattttatgttgaccaagtgtatgaaacagtctcgtgccaaggggttcaccctgacggaagtggtgcttgcgatcggcgtggtggccgtgctgattgtagtgttcatggccatgtttattcctgccagaaggacggttcagtccgccctgactattcgtgaagcggaccgcatcgtccacgccctgacggcggaacttggagaactccgcaattccgagcgtgccgcgtccaacgccagaaagtcttcctcctccagatatgtttccgcttttgacaaggcgttttactggatgcagttcacgtccaggcccgctacgaccattcttgtttacaattacagggcggatttgaccaagggggcccgcaaagacggaactccccagccctggctggaggatggcggaagcattcccggcaaaaatactgcggtggtgacgggggtctgcctggcgaacaacaaagagcgttgggatgatttcaaggcccttgtcggtcccgtcttcgccgtgcgcatgacccagctggtagtggagcgcatggattcaagctcctacgggtacaagctggctcccaagtacgggacgatttataatccttacaaccgcggcaaggtgattaaggaaccttccctgtatgtttatacgccggagaaaggcggcggcctgaatttgccgtggggggcggaagtcctgtaccaggcggagttcttccagctgttgaatacggaccccgagcgtttacaacatctgacgtgggaaaatttaaaggctcccgtgtttacgcgcaatctcgctttccgccgttagcgggcattatctgaagacctctgaaaaaacatgaagacatttgccaaaatcaaatccggcgcgttcaccctgattgagctcctggcagccatgaccatcactaccgtgctggttctggtaattgtggccctgacttcccgcggggtggatatctggagatgggtgctgcaggatgtgcggaccacgacgcttgcccgcacggccatggatactatgaccaaggattttgaaagcatgcagttccgttccgggaatccctttgagtggatgctggtgcagcgggacagcgatttggtttcccgtgcgggaaagaccaaggtttccaggaaaaagggccgctcctcctccctgaatgaagcccgcgtgaacctgatgaccatggggccggaaggcgccaaaatcacgaatgcctcccaattggttttctttaccacggctacggaccgcaatccggccaagtccagtatggacatgaggaatgaccgcatcatcggtgatgtgaattgcgtggggtacaagcttctttaccgtgaccagattctggaccaggacgctacggcggagtctgacggttttcccgtttattccctgtaccgcaacttaatcagcgcggaggataccgtgcgtaaccttctgggccagcaggatctatggtccgcttatgcacggtaccagcaggatgaaaccgtcccttccaacttcctggtggagaatattgtggaaatgacgctgatttttgaagtggattaccagaagaagatcggcaattccggcagcaacaaatcggacaaggatgcctcgcaaagagcatccgtgctggttccggtcatgactacgggcgccaaccgtctcggctcctgcacccagatggatgtgtatggcaatcgcctggacatcataggcagcagcgtgaatattgatgatttgaaatccggccgcgttactgccgtgacaatttccatgacggtggtgacggatgaaggcatggctcttgtggaccagatccggcagaaaaagcgtcccgctccttctcctgaagaatttttcgaacgttatacccggtctttcacccagaggattgcattgccgatgaaccgttaggcctgtatccgggaaaccggggagggcggaacgtccgctgttgctttttgcctggagcgttcctgccattaattgttctgtagttgccatatgttgggtttcacaaatatcgtcggcaatttatcccctctgccggaattagtgctgtggcgcgatcctgtcgccagaagcggggaggaagccatggccgtggacgaagctctgctggaatggggcaggaagcctgtgctgagggcgtaccgctgggcggaaccgaccgtgacttacggttattttgatgaggaggccacggcgcgcgccatttttccgggtgaggagcttcattttgtccgccgctggacagggggggggattgtagaccatcggcaggatattccctttactctggccatgcaccgcaagggagaaaaagagcgtccttccagcgcggttttgtaccgttggattcatggggcgctggcccgcgccctgagggattgcggggtggagtgcgtgatgctggacggggatgccccggacggagggcgggcctgtttttccagccccgtaacgagtgatcttgtccttcccggcggggaaaaactggctggcggcggccagagaagagtccgcggaggcgttcttcaccaggggagcatccagaattgtcttctcccttccggatgggatgaattgctggccgcccgcctggcggaaaagcattccctgtgcgtggacgcggaattgttccccggcatgaatgcctgcgtggaggaactgctggcttccaaataccgtacggaagcatggcgttccggcgtacggcatgggcgtccgtctcagccacggtaattccccccctttttttctttccgatgaattatcttccagatcccggccgctatagccacgtagcctaccgccgctgcgggcgcagcgggttgctgcttcctcccgtttccctggggctttggcataattttggcgctgcggatgattttgagaacgcccgtcggcttattcacggcgcgtttgatgccggtatcacgtattttgacctggcgaataattacggacctcctcccggttcggcggaagaatactttggccgtattttcatgcaggatttgtcccgtttccgtgatgaacttgttattgcaaccaaggcggggcatctgatgtggcccggcccgtatggggattggggatcccgcaaacacatgcttgccagcctggaccagtccctttcccgcatgaagctggattatgtggatattttctacgcgcaccggtatgatccggaaactccccttgaagaaacggcgggagcccttgttacggcggttcgctccggaaaggccctgtatgccggtatttccaagttcccggcggaacaggccaggcagatgtgctccatgcttggggaggctggcgttccgtgcctggtgcatcagatccggtacaatatgtttaatcgggaaccggagaaatccgtttttcaggctgttcgggaaacgggtaccgggtgcgccgctttctctcccctggcccaggggatgttgacggaccgttatctggaaggcattcccgaagattcccgcgcggcgggttcctccgtctttttaacaaaggagcgggttcttcagcatggggataaaattcgccgcctggccgccctggcccggagccggggccagagccttgcccagatggctctggcctgggtgctgaaagatcccgtagtgaccacggccctgattggagctagccgcccctcgcaaatcagggattgcctgaaagcactggatagtgcgccgtttacgccggaggagctctctctgattgacgcagatgcggatagataggcgctgtttttcccgtggtgctggtctttctgctggaaggggcatttcccgttccggacacaggttttttcttggagtaaagtagagctggtgttatgtttttactactttaatttaaagtgtactgacaatgataaccatccaggatttattttggctcatcccatcggcttccgtgctggccctcatttttgcgggcatctttttttaccgcatgaaagcgcaggatgaggggaacgaggtcatgaaaatgatcgcccggcatgtccgtagcggcgccatggcctacctgcggcagcagtataagattgtcgctattttctttgtgctcattactgttgtcttcgcttttctggcctactgcctccacattcagaacccctgggttcccttcgctttcatttcaggcggctttttctccggtctggcaagctacatcggaatgaagacggctacgtatgcttccggccgcgtggcgaatgcctgccgccattccctggatgccgggctgcaaatagctttccgctcgggcgccgtgctaggcctgaccgtcgtgggccttgccatgcttgatatcggtgcctggtactgggttctggattggttttacggggacatggagctttccatgcgcctggtcgtcattactaccaccatgctgacgttcggcatgggggcttccctccaggcgctgtttgcccgtgtgggcggcggcattttcaccaaggcggcggatgtaggggccgacctggtggggaaggtggaggccggcattccggaggacgacccccgcaacccagccaccattgcggataacgtgggcgataacgtgggggacgtggccggcatgggggcggacctttacgaatcttactgcggttccattcttgcttccgccgctttgggtgcggcagcttacatggccgttcctgaaatggcgatcaaggccgtccttacacccatgctgatcgccgccctcggcaccattctttccctgttgggcgtgtacgcggtgcgcgtgaagcgcggcgcttcccaaacggagctgatggcagccctgaaccgtggcatcaacttgagttcctttctgattgccattgcttccgcattcctgctccagctcatcggcctggataactgggccggcatctggggggccatcgtcaccggcctggcggtgggcatcgtcatcggcaaaagcacggagcattacacttcccatgattcctatccctgccgtaaaatcgcccacagcgcgaagacggggccggccaccgtcattatttccggcatcggcatcggcatgatttccacctgcattcccgtaattactgtcgtcgtgggcactgtgctggcttacggcctggcttccggagactggcatttcaccggggcggaaatgagcaaggggctgtatggcatcggcattgccgccgtcggcatgctttccacgctgggcctgacattggcgacggacgcttacggccccatttccgacaacgccgggggtaatgcggagatgagcaagctggacccggaagtgcgccgccgcacggatgccctggatgccctgggcaacacgaccgccgccacgggcaagggatttgccatcggttccgccgctctgacggcattggcgcttctggcctcctatattgaagaattgaagatttccatccttcactggagtgaggccacgggcaataccatttacaaaattaatgatgccgtgagtgtggaggtttccaaaatctccactgcttccctgtctgatttcatgggctatttccaggtaaccctgatgaacccgaaggtgctcatggggctcttcgtgggggccatgatgtccttcatgttttgcgggctgaccatgaatgccgtcggccgcgccgcagaaaaaatggttaaggaagtgcgccgccagtttaaggaaatcaagggaatcctgaccggagaggcagaaccggattacgtgcgctgcgtggaaatttccacggcgggagcgcagcatgagatgatctggccgtccgtactggcggtcatcacccccatctgcatgggtatcattttcggcgttcccggcgtgttcggcctgctggccggcggtctggcttccggctttgtgctggccgtattcatggctaattccggcggagcgtgggacaatgccaaaaaatatattgagcagggccatgtgggcggcaaaggctcggaaagccataaggcagccgttatcggcgatacggtgggcgaccccttcaaggatacgtccggcccgtccctgaacatcctgatcaagctcatgagcatggtggctatcgtcaccgccggcgtgaatatagccgtgaccctgttctaaacagaaagattctttcacggaaaacggagggagtccgcaagattggcggactccctttttttctggctgaagggaaccgtccactggggagcggttttttaatttccgcttctttcaaaggctctctgaaagactgttcctaatagggggggagggggtaagtatgattttttaaatcatatttttatttgtatcagattttatttttgttagtataaaaaataacaaaatgactgacagaataggccagctggctttttcttccttccggtttttattctgctttctggcagttttttccggagttgttcccttgtgggtctcggatggcccggatgatgacatgaaggagacggaagaggaagcctgcggccccctccagattaaatctcagacagagttgtactctgcggattattatatcaagggaggaagtgaacaggacaaggaagacgatagaaaaagaaaaaatataggagttggggagaatatctcctttcttctgatcggcaagcccaggggagatatcaaggaacttatttggagtatcaagggagacggatttcaaccgacagataatgagtcatttaaaggtgaacaaaagattgccctgagcgccagaaaagatttaaccaaagatactcgcgtcaccattacagccaaaaccggtgaagacaaagaagctaaaatcaccgtcaatatcaggattcccaagaagataacgaaggaaaaatatgagggacacatggatctgggagatggcttttccgccaatacggccgattttaaaatatccaagggggaacacggtgtctggggatttgttaaagtgacgctttttcctactgacgtcagttttaagggagtcaaggtgattgagcgggatggaggactcatgtgggaaggaaagaacgggactcccccgcggcctcaaccggaactggcagtcgagcatgtaacctgcaacatggccgctcccattcaggataaaaataatttttatgatatggtaggggacaatcgcaatattgaggaagttcttgaaacgattcgccggtccaaacataatcctcaacaattttggtttgtatgcaacttccatattcattggggaaagggagggaaaggcagcgagcaacaggattccatttttttaggaacgacaaatcaaaaataccgtattgaagccattgatcaaaataccacaaaaacggttgttgagaaattcggcatcacctttacaagaaccagcaatgaggattaaaaaacaatgaacctgttacctcctttatgcgcatgtgccgtctgcctgatgatcgggaagggcaatcaggcctattccgattctcccctggagagcccggcgagcatcgaccagtacaaacagccgtccgcaaccattcgggaactctccggtttgctgaaggacatgcggctcaaatccttctataacggggctaggaaacatacgctcacctttagtttgacgacacaggataacattgataccgagctgaaagagaaaatatggcattgttatctggtagcctcggctcccctttttacctacaaaacgtaccgggaaatcgagccggatgttgatatgggcgatgatagggctgatattcaccacaaatccagagtctgcctcctcatggaaaaatatatcggcctggtccggaagacgaataaaatcaaggaacccgttaaaaatcagatcatccggcgcctgtttcttccctattacgcgcgcatcctgaaacagtacaaaaacgcgcaggagcccaatccctaccagagggatgcccagggaaatcccgtccctcccctttccgacaaggaaaaggaattccggaagcgtgagatagaaagaatcaaacgtctccccgttcaggaagtcctcaaactgatgcgtgaaggttcaagccaccgttcttttatcgagacgagaaatgaagtatttggagacgaagtcaagcatcttgaaaaagccttgatgaaactgcttgtttccgaattccccggtcaagacggcaaggttgagaattttattctggaagccggatattcaaaagaagacatccccggtttgattgaccgcaccgtgggcagggacgaaaagacggatttcctttataaagggaaacatcgtcagaaacatgacaagctctacaggaaaaagaagtgatggtgtccagccccgaatgtttaagacgttctttctcccttttctttttgtgaagagatatgccggaaaccggggggagtgaagaaggctcgagtccgatggcaaggcttgcaataaccggtttctggaaagggaattctggattcgtaaaaaaggaaaagagaaacgtgctgcgccagttggcagctccgttccgccggtgggagtggggcgggcggttcctttggaagtttggaagcgccggagaggcgtcgtgttttctctgggcagattgagaagccaatacggttttttcgccattgacggaaagtttttttgacaaagaaggggcagaggagtaataaacgcgcagatgcatttcagcacagtacagcccttttttagcaagaaccgttattatggcaacggctattggtggcgcgtacccatgtccggacgggggaatcccgaggtgcagtaatagcattcagctatgaccatttttcaagaactgctttgattcctccgagagtcaaagcagtttttttattttcaacttacatcatcatccatgcaaacaccatccatgatcactctccaacagcgcagccgccgcctgagcgccgatctggagacccctatcagcctgtttctgagcctgactcagaacaaaattcccggacttctactggaaagcgcggaagtggacggcagatgggggcgctacagcatcatcgcctgcgattatctgatgaccgtttcctgtgtagacgccaggctttccctttccatcaaagacgaccgtctggcttccctgaaggagctggaaggcatgccttacctggatggactgcgctctctgatgcaacgtctggagctggtgggggacgatatgaggcaggctcccattacgcgggctctgtacggctatttcgggtatgaaaccgccgccctgttccagcccaggctggcgcaggccattccggcttcttccgcagagtcctgcctggtgctggccggcaccgtgattgtttttgaccatttgtacaatcgccttacccaactcagcctgggtgaacaccgggatttgtcccatgccccgctccatggggcggaggaaccttccgtcggggaagtttgccgcacaccggaccaggcagcctacatgaagggggtagagcatatcaaggagctgctgcatgacggagaagccatccaggtggtgctttcctcccaggcttccgcggagttccacggagacgctttcatgctgtaccgccgcatgcgcagcattaatccttccccatacatgtttttcatgcgcctgccggaggtgacgctgttcggatcttctccggaactgatggtgcgctgcacggacggcaagcttcagctttcccccattgccggaacgcgcaggcgcggcagggatgacgaggaggatgccgctctggctgccgatctcctgaaagatccgaaggaatgttcggaacatgtcatgctggtggatctggggcgcaacgacctgggccgtgtcgccaagcccggttccgtgaaactggaacgcctgatggagattgaacgtttttcccacgtgatgcatatgacttcccgcgtgaccgcccaggtgaacgacggattggacgtcttggacattcttggcgctgccttcccggccgggacggttagcggagcccccaaggtgcgcgccatggaaatcctggcggaggaagagcctctgccgcgcggaccgtacgccggatgcatcggatggctggggttggacaaaaacggcgtccacatggattccggcatcaccatccgcagcatgtgggtgaaggatgggcgcatccactggcagacgggagccggcatcgtgtatgattccgatccggccgcggaatggcaggagtgcatgaacaagggtaagattattgacgttattttgaaaggagaagaccatgtttctgttcattgataattacgattcgttttcgtggaatctggtgcaggcgttttatgccctgggacgcaagcccgtggtgcatgcgaatgacgatcctcgtattctggaactggcgaccagcccggagctggaagccgtgtgcatttcccccggccccagccatccgcgcaacgccgggctgtgcctggagttcctgaaacgcctccccgcttccgttcccgtgctgggcgtgtgcctgggacaccagcttctgggctacttcgccggggcggaggtttcccgcgctccgtatgtcatgcacggcaagagttccgacatcatccatgacggcgcggggctgttttccgggcttcccaatcccatgaccgtgggccgctaccattccctggtggtccagtccaaggaggacgagccgaatccccgctttaccgttacttcccgcgggccggaaggggaagtcatggccctgcgctacaatgaccgtccgtgggtgggcatccagtttcatccggaatccatcctgacgccgaacgggcttcagcttctgggcaatttcccggataacgttgtgccttcagggcagaaggaaaagcgcatcagccgcattctggacgccctggccgccggacaggacctgacggcggatatggctgccgcaggctttgcggacatcatggatggccgcatgactccggcccaggcgggctgctttttgatggggctccgcatgaaaggggaaaccccgctggaaatggcccacgccgtgggcattgccctgggccgcgccaaccgggtggaaggtttggaaggcgactgcattgacgtggtaggcacggggggagacggccgcaactctttcaattgctccacagccacggctctgacgctggccggaatgggatacagggtggtgaagcacggcaaccgcgccgtgtcctcctcctgcggttctgcggacgctctggaaggcctgggattcccgctggacgtagctccggaagatgtccggcgcctgttggacgagcggaacttcgctttcctgttcgcgcctaattttcatccttccttccgcaatgtaggccccatccgccgggagctgggcatccgcaccctgttcaatctgctgggccccctcatcaacccggcgcgccccacgcacatcctgctgggcgtggcccgtccggaactcgtcgagctgctggcggagacgctccgccagtcccacatccgcaaggctgccgtagtatatggcgccgggggatatgacgaggtgacgccgctggggcccaccaagatgatgatcatccacaacggcaggctgacgcccatgtccctggatcccctggattacggcatccagccctgcaatccggaggaactggccgttcattccaagtcggaagccgtggacgtgctgaaaaacatcctggcggggaaaggcccgcgtgccatgatggacatggtgattctgaatgtgggggtagccatgttcctgctggaggagcacatggacctgtccgtctgcatggcgaaagcacgggaagccgtctgcgcaagcataggaaggagaacgcttcatgctgcttgaccggttccgggaagccaaggcggaggaaatagccctgctcacggacatggcctcccgccgggaactgccgcgcccgtggaaggggcgcctaccggatttcctgaaagccattgcggaaccgccggacgggcagcccgtggcggtcattgcggagttcaagcagtcctctccgtcgcgcggtgtcatcgccaccgggctgaaaccggaggaagtggctgaacaatacgctgcggcaggcgcctcctgcatctccgtgttgacggaagaacagtttttcggcggccgcatcggatatttggaacgcatgagccgcgccgggcttccgcttctccgcaaggatttcatttttcatcagcttcaggtgatggagacggcttctacgccggcttccgctttgctgctcattgtccgtctgacgccggatgcacggacgctccgtgttctcagggagcaggcggaggcttacggcatgcacgccgttgtggaagtgttcgacgctgcggatctggaaattgccagggactccggcgcgcgcatcatccaggtaaacgcccgtgacctggacacattgaaaacggacaggcaggcctgcctggacatggcgaaattccgccgtgagggggaggtgtggatcgccgccagcgccatgagcgctggggctcatctcagggaagccgcggaagcggggtttcaggccgtactgatggggacagccctgatggacggaggaaggccgggtgaaaaactggcggcaattttagaagaaacgatatgaagaagcattcatttgcaatcaaggtgtgcggaattacccgccagagcgatttatcaaccgccatggggatgggggcccatttctgcggcttcatctttcatcccggaagtccgcgttatattgcgccgtcgcgcgcggcggccctggactccgccctgatccgccgcgtgggcgttttcgtgaaccagaacgcggaggaaatcatggatatcatgaaaacggcccgtctggaattcgcccagcttcatggcgcccattctctggactgcgcgcgccgcatcggtccggaaaaagtgatccgcgtattgtggccggaccggtatgaatccgtagatgccctgcaaagggaaatggagctatgggcggacagctgcgcctggtttctgctggatgccggcagccagggcggcggccacggcgtttcccttgactggacctccctggcgtctcttagttccccccggccctggttcctggcgggcggcctttcctccgcctcactgaacagggcgctggaacaatgctctccggacggcatagacctgaactccggcgtggaagccatccccggccagaaaagcccgcaaaaactgctggcggccctcaaaccactcaccccttacactccttaccacatcgcatgaagaaagaaggatatttcggcaatttcggcggccgcttcgtaccggaagcgctgcgccccccgctcatggagctggaggaagccatggactccatcatgccgtcccgcgagtaccgggatgcgcttcaggatctgctggtcaattacgcgggccgtgaaactcccctcacgttctgtccccacctttcggaaaaactgggcttccgcctgtggctgaaacgggaggacctgctgcacaccggagcccacaaaatcaacaacgccctcggccaggcccttctggccaaaatgatggggaaaacgcatcttattgcggaaaccggggcggggcagcacggcgtggctacggctacggcggccgcccggcttaaaatggactgcaccatctttatgggcgcagaggatgtagaacgccagtccatgaacgttatgcgcatgaaattgctgggagcgacggtttttccgattgagagcggttcccgcacgttgaaggatgccattaacgaggctctccgctactggatttcccatcaggcggataccctgtattgtttcggtacggcggcgggcccccatccgttccccacattggtcaggcagcttcaatccgtcattgggcgggaggcccgcgcccagatgctggagcgtgcaggcaggctgccggatgtggtggtggcatgcgtgggcggcggctccaatgccatcggcatgcttcacccctttgtggaggatgaaggcgtccgtctggtaggggttgaggcgggaggcaccggtgagcccggctgctataactccgcccccatcaatctgggtagccccggcgtgctgcacggtcatgtgaccatgctgttacaggatgagaacgggcaaatacagccgtcccattccatttccgccgggctggactatcccggtgtaggcccggaacatgcctatctggcggaaacgggccgtgtccattacggtgtgatttgcgacgcctctgctttaaacgctttccagacgctcaccagagaggaaggaatcattcctgcgctggaatcctcccatgccgtggcctgggtgctggaccatgcggaggaactgccgcaggggggggacgttctggtcaatctctccggccgcggagacaaggacctgggaatcgttaaaaaatatttgaatctttaagccgcattcttccatgaataatatgcagaaatcaccgttgcagaaagccgtggagagggcccatgccctcggcaggcgtgccgttatccctttcattaccgccggattcccggacaaggaatccttctggacgcacttgtcccgtattgacgaagccggggcggatattattgagataggagttcccttctcggatcccgtagcggacggcccggttattgaacaggcatcccgggatgccctggcccgcggcgtcagcctgaaatggattctggacggcctgaaagcccgcaagggcggtttttcagccgaactggtgctgatgggatacgtaaatcccttttaccggtatggcctgaaacagcttgccctggatgcggaggaggcgggcgtcagcggtttcattgtaccggatatgccgctggaggaatccggaatgttccgggaggctttcagcccccatggcctgacgcttgtcactctggtggctcccaatacttccgaggaacgcatgcgggaatacaagccttatacttccggcttcgtttatgtggtctccgtgctgggaaccaccggtgggaaagccaacctggagcggagcgttacggaaaccatgcgccgtgcccggtccgtttttgatgtgccgctggcgctgggcttcgggcttcagacgccggaccagctggagacgctgcctgaagatgcccggccggatgccgccgtgcttgggagcgctctgctcaggcacattggagaagggaaggacgccggggaatttttggaaaaatggaccagaggttgaactggatgtttctctctggtttttaaggatgggcctgcacaacttattgtgcaggccctttttattttatctggtaatgaacggataaaatacggattcgcaatccgcttcacttttattcacatattattcaatttttaacagaattattatattgataatgaatatgttacatatctttaacataatctgctggcgggaatcccggatttttttgacggagaaaacgttccgggtattccggaaaaccgttgtaactgattcttttcctttgacagcggattgcgaattccttatttatattcacaatcatatttcccttgccgtgttgtgggaaaggctcttatttgttcattaaatacctaattatcaaacgtttcatgaaattacacctccctttgaatttattggctgccttgatgacctccttttccggagtaacgcttggcaccgccacgctggcaggagtttctggtcttttggtgacagcatcacagtcctatgcggcggatgtcgcctttgacggaacccaggtgaatgtggcggcgggaggctcggcctcctatgatgtcggtactgttacggcttctactaccttgaattttgccggagccggtacggcctcaatcaccaatttgaacgggacggctccggaagccatcctgacggtaaaccgggtggccaacgggggcgccagcctttccaccctgacattgaacggggcaggcactttcaacggaatcatttccctttattccaacacgacggggggatctcagaacaacatactgaacctcaaccatgcgcaggccgcccaatacgccacgatcaaactgggcggttacggttatacgacgggtgcttccgtcctgaaagccggcgtgaacacttccatcagcaagctggagcacaacaatgccgcggctttgatcactggggagggaaccacgctgaccatcacgggggattcttcctcttacggcggcagtttcggcggcaccgtaacggtggactatacggggggaggcaccttcaccctgggcaattccgacaagaatacggcgctctctcccgcggcatctccgaacgcaaccctgaaaatcagcagaggcactctttccctgttctccggaaatgtcacctggtcccaaaagctggtcatgggtgacggtaccacactgaatattcaggacggacctcccgtgacgggtgctgcctcctacaatgccgcttccatcaatagcggcggttttaatttttccggagcggtgactctcggcagcggcgtcaacctgacatccagctggggcaagaacgtaaaattttccggtgttctcacggcggcaagcggtttttccatcagcggcggcgcgaatgaatatacctattacaacctgctcaacaccgccaatgaaattggggggacgatcgccattacgcgaagctttgcctctctgggcatcggtgcttccggctcccttgggactgccgccgttactacttcggccaactcccagtacctgacctattacggcactgcgggggatgtggcggatgtcattggcaattccatcaccggggcaggcaacttcgtcgcccagtcgggctgggtgcatctttccgagaacgtggcgcttacgggaacctataccgtcaattccggcgccgtcctctccagggccggttccattaacgccgcgcttgccggaggccgactggatgcgggcgccggaaccatgaccgtgacgggactgtcgggaaacggcaccatctccgcctctgcgggcaccatgaatttccagaacgccttcacggtaggggaaacgatgggcatcctcgccaacggttccgggacgatcacgggcaatgtgacggtggatggaggccgtttgtattatacttccatggacaatgtcggcagcgtgctgcagaacgtgacgctgacttccggcctcattgatttctccggttttcaggaattccaggacttgttcggttctgaagccctggtgaacacctcctataacctgggcgttgatttggggaacggctttactctggcggatgttgacgagtccctgtacacaatcagcaccgtggacggaaaaacagtcatcacgtttacggcttccggcgcccatgagaccgtctgggaccctgcctgggggctggaagaagctccctcttccgcaacaggtacgctggtaaaccaacagtctttgtccctgtacggcatccgggcttcttccatgcaggaggggttcggttccgtgaatgccgtcaccggaacgggagacctgacaggagtgaccctggccggcggctactacaatactgccaccagtgccacggctacggaaatcaccaccggcatctggacggatgtgctggggggcaattacaatctgattatcggcggcagctatgccaataactggagcggctccggcaagtggaacgttacgggagacgtccatacccagattcagggggacactgccgtcaattgggttgtgggaggcaactacaaggacggccaggcggcaggcatcacgggaaacgtttacgtatccgtggacgggaatgccgtcatcaagggcagtttgataggcggcggcacggcagcccataattccgtaaataaccttgacggcagcacgtacgtcgtcgtgcgcagcatgcaaagcgtcacggacgaaaccatttcgctcaactccgttgtccggggcttcatcattggcggcagcacttatgaagccaattcctcgtcccgtgccgccattaccggaagcaccaatgtgacgattgatttgggaacggcctccggcagttttgtcaagagcatcgtgggcggttcctattcgggaggttccggggcatatacggttggaggcgattccagcgtcagcattaccgctgccagtgacgccgtctttaccggggctatttacggcggcgggttcagctcatcaggaacatccaccgtcagcggcaattccagcctgacgctggatggcggtgcgtacacgggtgctctttacgcgggtggcggaggaacagggtcttccgtaaacggggacgctacccttaccgttaagaaagcagtattccggacgggcagctcgctgaatgcgtcgggaggcacgataggcggcacctcttccttgctgctgggaggttacggcaatacggcggatcacgccatttccttctccaatacggctgcgaccggtttcgacatcgtgaccatgttccaggattctttctttacggggaatctgaacatgaccggttccagcgtgctggcgctggcgggaggggcaggaacgggaatcaatctggacggctcgttctctctttccgctgaaggggaactgaacctggatctttccgaattcggaaccctgacagacggcatgtccgtcctttcaactacgggcctgtccaatatatcttccattaaggcttcctttgctgacggtgtggctgggtccatcaccatttccgacaacggcaaagaccttgtctatacggcgggaaccctccttttgtgggaggggggtgaaaacggcgtctggagcgcggaacatgtctggacggacggcggcgctcccgccacatatgcggatggtatggcggtttcctttgcggaccaggccggagtcgctaactctgtcgtacagctggattctgaggtttcgccaagttccatgcttgtccgcaactccaccacccgttatgaactgacggggacgggagaaattaccaatacggctgtcaccaaggaaggcacgggaacgttggtcctcggcacctcttccatactcggcacgggtactactgtggctgtgtcgcagggtgttctggcattcggttatgatacggcccttcccggcacgggggtaacctgggaggccggttcctttttgggtgcggccaatggcgcgacggtgacggtggatttgggaaccgtcactaacccggtattctccctttctccggatgccaactctttcatcactctggcgactccgtccgacatcgttttcggcaatgccattactggggaaggaactgtccagaaaaccggcacgggcttgctgaaactgacggggagcaactccggccacatcgtggtgcaggagggcaacctccagatagggaacggaacctcatccatccgctggggaagcgcgggttcttccgtcaccctggaaaacggcacgtcgctgattattgccggcaacagttcgggaacctcccaccataccatcaactccgatttgattttgggaacaaacgcgtccgacgccgtttccctgaaatgggtggacgcctcccaggcaagcgccgcggactatcagcatagcttcaccggaaccgttaccgtcaacggggcggtctccctggtgggcagggacaactgggccaaggaaatgggcttcaccggaacgctcactggagtaagctctctgacttacagccgcggagcgggcgacggcaggtacaattccaacggaaagctcatcatcagcggagacgcttccggatttaccggaatgatcaccatgaatgcttccaacggctatagcgccgggctggatctgcgcacttccatctctcagggtggcgtcaccctgacatccggaacggacacgaccggattcgctttcatgcgcgtgctgggggatgttgaaattgcctctctggacggaacggaaaattcccaggtgggagccgtaggcggtgcgcgcacgctgacggtgggggcaagcacgtacaacggcacgctcacagaccgtggtgttgctcttgggtacggagccacttccatttcgtatgacgaatccggcgtcctgtctctgaccaaggtcggcgaggaaacgctgacgctgggcgggacggtcagctacacggggctgacggatattcaggggggaacgctcgctcttactgcttccggggctacgtccctggggaatatcacgatggcggccaatacgcggatgacgactgcgggcgccctgaacctggcggccaactctacgctgacactggatatcagctccgccctcgaagtgggcggcgctttcggggctggaacgttcaatcttacgctgaacgggcttgaaggcattacggatgccggggaatataccctgatttccgccgccagcggtcttgatgccgccagcgccgtctttaactgggccggatataccggggacgaaacgctgatttatgaactggagcagacgggaacatccctcaagctggtagtgacttccgccggggacgtatggatctggcagggagcggaaggggtgacctggagcgatacgaacacgggcgccatgtggggcattgaaggttccacggatacggctgccgagaagaatctgatcttcaacagtaccggggcgggaaccgtcaccctgtccggagcggtgaatcctgcttccatcacagtcaacaatgctgctagcagcgattatgtcttcgtttccgacggcaccggaaaaatcgcccagggaacgctgaccaagcgcggcgaagggaagctggtccttaatttggacaacacgggttggaacggggatatttccgtccagcagggcgaactggtagcccaggtcgccaattccctgggatccggagccattaccgttacggacggcgtgctcactctggctacggcggacgttcaaccgggaatgggcatgatcaacctgcagggcggccgcctcaatttggcttccggctcttttgccacggcgtttaccgcagacaacatgacgtggacgggcggttccatgacgctgggcgaggaagtggccgccaccgtcgccaaggctctggccaatggaaaagccgtggaattggcggacggttccgtactgacggtcagcggggctaatgataactcggctctgaacctgaatgcctccggttccggtaccgtttccgtgggactgggaaccagctatggggccaatgtcctgaatatgagcacggaattccaggggatcctgtccgtgacatccggctatttccaattgaataacgtaacgatgggggcggacggcatcttgaaacttgcggattccaacgtccgtacggaatggaacggaacagccggaggaacgtttgccaatgacgttgtctttacgggcaaccaggtctttgccaccaaggatttcaccttcagcggcgatttgagcggaacggcgttctccacccagggagcgggcaatattaccctggcgggcggcgtcaacctggacggtcagctcaaggtgcaccgcggcacggttaccgtgaattccgccgatgtggccaagctgggggacagcattgacatccagaacaactccacgctggcctttgcccgcgatttctcctacggaggcgtcatcagcggtacggcaagcagcacggtatccgtaaacgccggaacgctggaactcaccggagcgaacaccttcctgggcgcactctccattgcgggcggcgctacggcgcggctgggtgacggaagtgtctgggccgggtccctctccggagctggttccctggttattgacactgctggagagataacgctggcggcaagcaacaccgggttcaccggttccacgacgctctccggaacgggcaccgtcaccttggcgggggccgactccctggggtccggacgggtcaccgtcaataacggtgttctcaatctgtcctccctggatgcggccaacgttattctgattacgaagggaagcctggcaaacgcggaagccaaaaccgccggaaacgtggaagtggccgcttccgccggaacgcagggagccctgaataccatcaatctgggcggcctgtccggctccatggtcggctccatcgtcatggaggattactcccggcttacaggcgtttccggtgctctggacatgacgggcaagacggtgacgctgaaactggattccggcagccttacagcgggcggaactaccggacagggcgttattgatgcggacagcctgacgctttcagccgccacaacaaccatcaacctcagcaaccagggtgttctggacctgcttgccgccaaccgggattccactgacggcgtagggcttgtactgacaacgggaaccctggctgtggataatttcaagcaaatcggattctctcctctcctggcttccctcggctataccgtgacggaagtcctgggtgcggacgggacgctgatggtcagcggcaatacggatcttgtctatctggtggacaccacccccaattcagacaaccccaatatcagcgattacgccgcgctggatccctacaaggctgtcggcattaatggcaccacgcttcatgtgagcctgaacggggctccggaagcctcccggaatggggacggcctgaaagtcagcaacctggttggcagcgacggtgcgctgaccgtgacgaatacggcggatgatgcggcttccaaccacgccgtggtggatctggttcaggatgttgacgccggcggcaacagctacggcggaaccatcagcggggaccatgtggattttgtcaagaaaggtgcggaaaccctcaccgtagaaggaaacttcaccgggaatgactccagtctcagttcctcggagggaaatatcatcctgaacggtgcaggcaatagccttactacgctggaactcgcgggcggagacataacgctgggcggacggaatgacggcgcctcccgtgtaaccacggtggagacgctggctgccggcgcgggagggggaaccctgaatttgggtaacggagcccagatggttcttaccggccagcaggctggcagccatgtcacggaagtgactatctccggggacggtacgctgaccttgggtggtacgggaacagactcctccctgacactgggcaacggctcttccctgaacggtgtcctgctggatatccgtgaagggtccgccctgtccgctgcaaccggttccgtgaataccgtttccggactggagggcggcggagctctgaagctgagcggtgcggaaatgacgatcagctcttccgattcccatacctttaccggtactctggacggggcatccggaacgctcaacgtcaaatccggcaacggaagcgtccagactatcaagggtgcgggcaatgcaggttatcacctgaatgtgagtgacggcggcgtgctgaccctggccggaacggcaggggagggcggcaatcccgcccaggcttcctatcaggggattaccgtgaacggcggcacgctcaatatcggcagcgcagacgatcccaaaacccagctgacgcttggctcggacggcttgagcgtgacaggggacagcacagtggccattaccacttcctccacaacggtggacggcctgggcaatccctttgtcacctccagcggaaatattacgctgggagacgggacgggggaagtcacgctggtcatgaacaatctggataccctggtttccgggagttcggaaacgctgaatatggaattgttcaagacaacggacggcgcgctggtgtccctgggtgacaatgtcaccctccaggacatgattcttggttccatgtatgaaaacctggagctgaccaccaatgacagcatgacggccatcatcctcaccggtacggcgcgcacggaaaacattttccgtgactcttccctgacgcggaatgccgctactggagcggacatcctttggaattcccgctatcacatggaggaaggctctgccttgcgcgatttctatacctctgttcttctctcccagaattcaggcgactattccggcgccgcccgcaaactggccgccgccgccggcagcacggttaccagcctgggcatcgcccagcgcgactccctgcgcgaccagatgggctggatacgcaaccgcgtggcgcagatgggcgttaaccctgcatatgtccatgaagacatgccctacttccatatgtggatgcagggaaccgggtcttatgccaagctggacaccaggggggatgaaagcggctacgaactcaccacctggggaggcacggtaggcatggacgtggatatcaacgaccgcctcactgcgggagctgcgtttactgccaattacggaagcctgacggccagcgcggcggatacggcggacggagacctggacagttactatgtcaatctgttcgcccgctaccagtaccgtaaatggtcccatctgctgattctgacgggtggctggaatgatgcctcgctgacgcgcacggtgaattacggtacggggtcttaccaggcccgcggcaatacgacgggagccggtttcggcgccatgtacgagttggcgtatgacatcgctctcaatgaagacaggagcgtgattctccagcctttgtttaacgcttccatcgtgacgacccgcatggacggctatcgggaaagcggttctgccggaaatgccggactgaaggtggaagaccaggaactgactacggctgctgtctctgtgggtgcccggctctccggactcatggggtccaatatcttcgggcgtgaagcgctgggagaagtacgggtgaacgtttcccaggatatgggagaccgccgcgggcaggctaatgtgggcttcctggcagatccctcctatacgcgtccggtgtatggcgccaaggtcggaagcacggccttccagattggcgcggggctgagcgttcccgtgggcacccagggcgtcatttttgtggacggcaatgcggatatccgcagcggttccagctccatcaacgggagtatcggctaccgctacaacttctaaaggaaaaaacgtcggccaattggaaagccgctgcggatgattccgcagcggcttttttcatgaatgggcgggatttctttaaggataacttcaagcttgggttgacgttcctgatggctgcttacttccattcccattcaatgggcgtttccagatcgggccgcagcgcctggcgcacagggcaggacaaggcggttttttccagcatggcgcggagagggtggctgccttccaggggcatgattgccttcagttcaattttttcaattcccttggatgattccgccgcacgcgccagaacgcgcatgcctttcaaatccactccttttctggccgcgaccacggaaaccaggctcatcatgcaggaggcgagcgtggaaccgagcaaaactccgggggaggggaattctgcgcggccttcaaaagaagcgggcaggtccgtggcaaacgtaacgttggaaggaataaaggtggtttcgcagcggaattgtccgacgttctccgtttcggaggtgtaataatgatcagtcatgaaggtgtgacagcgaaaaccctgttcgggttcatccggttcaggttattttcacgttgaagagccgtgaagttccgctttgcagggaacctggccgttccttcatgacatggttgatttttccctcttgcttccggttcccggcatcacttctttttaagcgttgctccgccgtgtcttcttgcggcgggaaaaagcttacgccgtccccttcggcttccttgcctccagaatgcgccggatgggttccgcataaagctccggctccagcaggaaggaatcgtgtcccttggtggaagcgatggtatggaattccgtgggaatatgggcggcttcaagctgcgccgcgaaatcctgctgttccgccgggcggaaacagcaatctgtatcaatggaaaagataagcacgggaatccctgcgcggcggaagccttccagagcggtttgaaatgttccgtccggggtgtggtcgcggatgtcgaactccgcccacatatccgcaatacggatataggcgttggcgtcaaagcgctccgcgaacttggttccctggtgaagcatgtagctttgcgtgctgcgggtgggggtcatccacgtgagcaggccgtagttgcctcccacctcttttctggcgcgctgttccagcccctcctggtaaacaaatgatttgtggccgatgatacgggcgaacgccagcccttttttgggcaccggttcccggtagtaatccccgccttggaaatccgggtcaagctcaatggccaggatttgttcaaacagggacaggcggtgttcaatggaagcccggtagccggagccgatggagatgaagctccggacccgttccgggaactggcacgcgaagctgagggcgatcaggccgcccacggaggggcccataagatgaacgcgttctatgcccaggctgtccagcagaagggcctggagacgtgcctggtctgcggcctccacatgcgggaagcgggagccgtagggctggccgtccgcagggcagggggcagcggggcctgtggtgccgtagcagcctcccaggtaattggcgcagatgatgcagaagcggtttgtgtccagcggcttgccggggccgatgatgctgttccaccagccctcgtggttttccggtttccagagggaaccgatgcccgggacttccggattgtaaccgtaggcgtgctggctgccggaaagagcatggaacagcaggatggcgttgtctttattcggcgtcagggttccgtactgttcgtaggcgacgcgaaccttgtccagcgtagctccatttctcagggagaaggagttgggaagatccaggaatttggtttggacggcaggaagctgcatggatgtacggaaaggggcttggtcagcaaaaaaagaccggcacccggcgggcggcggtcttcttgaaatctgtgctgggccagggattacttgacgccctttttggaaaggcgcgtgcctgccgtagcgccctggcgggccttgaacttgggattgctcttgcagatcacatacagcgtgcccttgcgcttcacgatttggcagtctgcgtggcggcgcttcatagaggctaaggaagaaagaactttcatggtgtataactccggtttggtgttcggttcgggagacggaatataccggttagttaagaattgtaaagtcatttctttgccaaaagtaagatgccgtctccgcagagatgcttttatgaggaagatgcagtaaagcatgggatggctttggattccgcaccgatgtaaaaatttagggaagacgtcatttagccgggaaaataaaatgcgggaagggatctctgccgggggaataaagggtttgtggaccggaggggattcgtataacatcttttccggttttccttatgactgattcttcctctcctgattcctccccggcttcccggaatacgtttgcccatcatttgggaatgaaagggtttctgctcatggaagggctgttgaagctcgtgggcatgaaaacgctgtaccggctggggcgcgcggcaggggccgtggcgtggcatctgcttccccagcgccggaacattgtggaaaggaatctgcgcatcgttttggatccggccctgcgtggaaaggaactgcagaaattaagccgggaaaatttcaaaaggaccattgccaattttttgtgttccgcgaagacggccaccctgacggatgagcagttgaagcattgcgtgacggtcggagggcacgaacagtttgccgcgcctgtgctggaagggcgcgggcaggtttgcgccatagcccactccggcaactgggaggcgctggcgagaatacgcgcattttacccggaggtggagcgttacgggtccatgtaccgccagtttgacaatccgctgatggaggaatacgtgtaccagcggcgcacggaacgtggaactcagatgttctccaaggagggaggcatcaaggctcccatgaaaatgctcaaggaagggggggccctgggcgtgctgagcgaccagtttgtatgggagggggtgtatgtcccctttttcggcaaggtgaccggcacgactccgctgcccgctctgctgagaaaaagggctggcgcggacatggtggccatagcggtgcgcacggatgctcccggccactggatagcggatatggggaatgtggtggatttttccaggtcggacggctctctggcgggggacacgattgaagtgaacagggggctggaaacgttgatccgggaatccgtgctggatgtgttctggatgcaccaccgctggaaatccgttgaccgatttgccccgcaggataaaaaaacggctgcgatcctggaaaatatggagctgaagccgtaccgcattctggtagccgttcccagggcgctggatgaagccctggcgactgttcccctgattcgtgctttgaaaaccgtccggtgcgacatgcaggtgaacatcgtctgcccgtctgcccagctggggatatggaagacggtgccggaagttacccatgtgctgccgtacgactccctgaagcagcttcgggaagctttggcagcagatgaattttacaatgacggaccgctggatctgggcgtcatgctggatggagatatggaaaccctgaaagcgctggaaccgtatggccccatgatgttttccgggctggacacgcatcccggtgcccggaagtacaaattccgggtaaaggcccccgtcctgcgcgccgcccccccggcgcaccgggtgcagctttatctgcaattgggggggctgcatgggctggacgtcgccaccccgtctttgttccctgtgaaaaaagcggccccggcggaagatgcccccattttaatcgctccgttttcccgcctggggagcgccagtgaatggagctgggaacagtggagggagctggtttcccttctgccgggacggacggtgctggcggctctggaagaagaccgggagcgtgccgcgtccctggcggaacatttgaatgtggagctggcggtgggtgcgccggaagctctctttcccgtcatggacggcgctgcggcggcagtagccgtggatggcgactttccgtccctctgttctttccgggggcttccggtggtgactctgttttccacccggcttccggatgtttaccgccctatgggcacattcaaccgttccctttacagccaccagtgctgttctccctgcttccggaaggaatgtgaccgggatgttccctgcaaccgccacattgctgtgcgggacgtactggaagccttgcgggaaatttccgggaaagaataatctgggaagggacggaatgccgtcccccggcgttggcggaaaaacggcgggaatgctgccgttgccgtaaagaatgatggaataacgaaaggaattgcggaaatgccgtattccggagcaattccagaaatgcgtcttcctttttgcatggattctgcagtggaggggagagggcccctcatccggaagagggggatgcctgcgtccggtttgctgcggttggtggcgccaaagcgcgaaaatccggttaatgcacgcaatccggaaagcctccccgccggaaaatgccgcggacctgttccgccagttctgcggacgcttccgggacgtccttcaaggtatagtccagcttcaattcatcccatttgaatctccccagctggtggaaagggagcacgtccacgcgttccacgttgcccagaagcgccgcatggcgggagagttcctcaatttcttccagattgtccgtaacgccaggtaccagcacatacctcagccacacgggcttgcggagggaggccaggcgttccgcaaactccagtgtggggcgcagttccccgcctgtcagggcgcgataccgtttcggattccatgccttgatatccagcaggaccaggtccgtatccgccagcatttcttcgcccgcattcacgcccagatggccggaggtgtccaggcaggtgtgcaggcccagtttccggcagcctttcagcacggcaccggcaaaatccggctggaagaggggatccccgccggagagggtgactccgccgcccgccgcctgcaaaaaatcccggtaacgggctatttccttgaggacatcatctgcgctcctgagctagcccctccgcacgtaggaggtatccggattatggcagtagcggcagcgcaggctgcagccggacaggaaaaggacgaagcggatgccggggccgtccacggtgccgcaggattccacggaatgaaccaaaccggtgacggagctttctccgtccggatcatggttttgtggaaaaacctgcggcatccgcttgcagtccgggttaacgggtgtggaaagtgcggttgatgacctcctgctgctgttcccgggtcagcttgatgaaattcacggcatagccggaaacgcggatggtaagctgcgggtatttttccgggtgatccatggcgtcgagaagcgtttcccgttccagtacgttcacattaatgtggtgacctgtagcggcaaagtaggcgtccagcagggagacgagcttgacgcggcgttcacgttcctccttgcccaaggcctggggaacgatggagaaggtgtaggagatgccgtccagggagtcgtcataggacagcttggctacggagagcatggaggccacggctccgttcctgtcccttccgtgcatggggttggctccgggggcgaacggttccccggctcggcggccgtccggcgtgttgcccgtctttttgccgtacaccacgttggaggtgatcgtcaggatggactgggtgggcagggaattgcggtaagtgtggagcctgcgcagtttttccatgaaattgctgaccaggctgcatgctatgtcgtccacgcgcgggtcattgttcccgtaacaggggaattccccttccgtcttgaagtccacaatcagcccttcttcattgcggatggcttttacggtggcatacttgatggcggacagggagtccgccgccacggaaagcccggcgattcccgtagccatcgtgcgcagaatttccggatcatgcagcgccatttcaatgcgttcatagcagtatttgtcgtgcatgtagtggatgatgttcagcgcgtcaatgtaagttttggcgagccagtcctgcatcttgtcgtacagggccatcacctcatcatagttgagaatttcctccgtgtagcggggggagggcggggccacctgcttgcccttgagttcatccacgccgccgttcagggcgtagagaaggcacttggcgaggttggcgcgcgctccgaagaactgcatctgcttgccgatgcgcatggcggacacgcagcatgcgatgccgtagtcgtcgccccaatgcgggcgcatcaggtcgtcgttctcgtattggacggaggacgtttcaatggaaaccttggcgcagaagcttttgaaggcttccggcaggttccgggaccacagaacggtcaggttcggttccggagcaagccccaggttgtacagggtctgcagcatgcggaaggaactgcgggtgacgagggtgcgcccgtcctctcccatgccgccgatggattccgtcacccaggtggggtctccggagaacaggttattgtaatcaggcgtgcggatgaaacggacgatgcgcagcttcatcacgaactggtcgatgatttcctgaacttcctcttccgtgatgagcccctgttccaggtcgcgggtgaaataaatgtcgaagaaagtggaaacgcggcccagggacatggccgctccattctgttctttcacggcagccaggtagcccaggtacgtccattgcacggcttcgcgggcgtttgcggcggggcgagtgaggtcgcagccgtaggaggcgcccagctgggcgagttcttccagggcgcgtatttgttcgctcatttcttcgcgcagacggatcagctcatccgtaaggggggaatgttcacggtttttgaggtccttgcggcgttcggcaatcagcttatccgtgccgtacagggccacccggcggtagtccccgatgatgcggccgcggccataggcgtccggaaggccgataataatcccggcggaacgggccgcccggatatcggaagtgtaggcgtcgaaaacgccttcattgtgcgtcttgcgtatctttttgaaaatgtccgcggttttctcgcacatcttgaacccgtaggattccagggcctgttgggccatgcgcaagccgccaaagggcatcagggcccgtttcaggggggcgtccgtctggaggcctacgaccacttccagttccttgtcaatgtagccgggcttgtgggatgtgatggaggataccacttcttcatcagcatccagcacgccgccgttgtctatttcccgtttcagcaggactttcagctcgtcccataaacgaagcgtgcgctgggaggggccggaaagaaactcttcattgccggaatagggcgtgtagttatgctggatgaaatcccgtacgtcaatggactccgtccatgttcccggcttgaatccctgccattcctgcggaagggcggtggactccttcaagtcttttactatgctgatcataaatagaatgtagtgaagaagactggagaaaaacgttccgcagcccctgaaaggctggaaacggcaaaactccgcgccgcgtaattatatcgtgaattccgggggacaacaaggctaattctttgcgaagagaacgcgggtgcgctggctttggcatgtttcacctgtctgtccgttgcggagcggaaaatgaggggaacatgcgattgcggaaaagtgacggaagattatttctctttactttcctaatctctattgcagtatctcaacgcttaccgttatgaaatcttatgcatgcctttgtttattgctggcgggagttttttgcgttgcttgtttctccggtgcctgtgctgatgaattgccgcccacgctgaagccccaggtgaacccgcgggctgtgtatgactggaaaaaacgtcatgaagcagtgatggagcggaaccggaccgtcaaaccggaatatgtcgtctttggtgacagcattacccaccgctggggcggcgagccttccggggacaacagggctctcggaacaggaaaaaccgcctgggatagcctgttttcttcccatgcggtaaccaatatggggtttggttccgattacgtggataatgcctattaccgcttgcagctgggagagctggacggcatttctccgcgggtcatcatcgtgctgctgggaaccaataatcttggcgggcggaaggatgctccccgggtctgcgcagacaatctcaaggcttttgtgagcctggcgcgccggaagtgcccctcttccaaaatcctgttgctgggcattctccccagggaggaaaaaaagctggctcccctgattagggaaaccaataaaatgatatccggcctggctgacggaaacagcgtgtttttcgccaatcccggcgaggaattcctgggggaggacggagtgtccccaaaacccgggctactggaggatgggctgcatcccagtgccagggggtacgacatactggggaagtcgttgagcgtattgctgaagaaaatggacgacaagtacggcaagctgcccgctccccggtagatgaatacgggggagggcgttcctgttccgggagaggccgggggatggatgaaatggagcgcgccttggaaaaggccggacacggtgctcgcctggccgtggttgcggcaggatttgccggacgggcagtggtcttttttactctgcacgcggaagagacgcctgcgatcttgatgcacggcaggatttgcttaaactgaaaaccggttttactttttgattatgaatttcctctcctacatactcgccatattgctggggagttccagtctggcattttctgcgccttccattccggcctccgcgttgcccgctaccctgaagccggagccccatcagcgggacccgtatgattggaatgcccggcatgaagccgttaaaaaaagaaaccgggccgtcaagcctgaatacgtgatgataggggacagcattacccaccattggggaggggagccttccggggacggaaaaaatacgggatcggggtcctgggagaaattattcggtccgcatgcagcgacgaatatgggctttggatttgattatgtggataatgcctattaccgtgtccaaaacggggagctggacggcatttctccgcgggtcatcattgtgttgctggggaccaataatctggggcaccgcaaggatacgccgcaggcatgtgcggacaatatcagggcatttgtccgcctggtgcgccggaagtgcccctcttccaaaatcctgttgctgggcgttctcccacggaaggagaaaaacctggcggaaccggtgaagcagacgaacagactgttggcggggctgcataacggaaaggacattttctttgccgatccgggaaaggcgcttctttccgcagacggtgcttctccgcagaatgaattcatgaaggatgtggtgcatcccaatgccagggggtacgaggttttggaaaaggaactggccgtactcctgaaaaagcttgatgcaaaataccggggagggaagcaggcgggaaagcattcctgatgatcgtcttctgatggaaggtaggattctgcttgaagggaaagccccggttgaggaaaatatacggcctttgatatttagtttatgaaaaacctgttgtttacattgttgaccggttccttttgttgctgttatgcccaacagaaggccgcacccgttccggagcctgaagttgtcgccactccgccggctgatgcggggcgcggccttatccgtgtggactcccgtgaaatacgccattattccggtacccgcaaggaaccggattatctggtcagcagggataacggaaaaacatgggaaatgaaggccgctccggctggctaccctcccaactacggtggcattcccaaggaatctccggctattgtgcgcaaccctttgaccagggaattcattcgtgtgcagcctatcgggggctttgtatttctttccaggggtgggctggacggcaagtggcttgccgtcacgaatgacggcaaactggaagaagactggaaagacccggaaaagaggaaaagcctgaaaaaactgggcggaatcatgcggacccccgtttttgtgaacaagggccgcagggtgatcgtgccgttccacaacatgggcggcggcaccaagttccatatttccgatgacggggggctgacctggcatgtatccaggaacggtgttacttcccccagacatgaagccaggcccccccaccagggcgtcagatggttcaacaatgccgtggaagccacggttttggaaatgaaagacggtacgttgtgggcgcttgcccgcacctcccaggaccaggcgtggcaggctttttccaaggattacggggaaacgtggagcaaaccggagccttcccgctttttcggcactctgaccatgaacacgttgggacgcctggatgacggaactatcgtttccctgtggacgaatacaatggctctgcctgaaaacgccacagctggcaacggaacgtgggaggatgtattcaccaaccgtgattcccaccacattgctatgtccggggacgagggcaaaacctggtacgggttccgggagattatcctggacgaacaccgcaaccatcccggctatgctacgctggatggtccggaagaccgcggcaaacaccagagcgaaatggtgcagctggacaaaaaccgcatccttatttccctggggcagcataaaaaccaccgccgcctggttattgtggaccgccgctgggtaggggccaagacgcgtgccacgcagacggggaaagatttggattcccagtggaccattcacacttatatcccccagaaaaaaggccattgcagttataaccgcaagccttccgccgagctggttcaggatccgtccgggggcacgaagaaggtgttgcaaatcaggcgtctggatgatcccgagctggtcaatgaaaaatccaatgtggattaccggaacggcggagctacctggaactttccgaacgggaccacggggttggtcaaattccgcttccgtgtagcggacggggagcaggcggatgattccggccttcaggtctctctgacggaccggctgttcaatgcctgtgattccactacgaaggattatgccctgtttactttcccgatcaggctgagacctgcgccccatctgttgctggggatgaaaaaagtgcctttctcgcccggagcgtggcatgaaatttcccttctttggcagggtgggcaggccgtggtgtctctggacggaaagaaggccggaacgttgaaaatggctaataagtcccctaatggagccagttatatccatttcatcagcaccgggtcccaaccggatgccggcattctgctggatacggtaaatgcccgggtgaagtaaggagcggcgggattcaatggttttccttcttcagaagcggtggagcgcttaattccggcaggtatttcagcaccatctggagatgttcgtttgaccggttgcctatcctctggagggctgtgcgtccgtatttgtctttcagggatgggtttgcgtggtggtccagcagaagacgcgcaatacccagtttcagccggtccagggaatcgtctcccagcagcatgcctcggcagcatgccatgaggggagtttctccggcggcgttttgatggttgacgtcagctccctctttgatgaagagattgaccagatccctgatttgagggaggcaggacacatcaatgaaagccagctggcggcacaggttcagcagggccgtgtctcccgcggtttccggcagggtggtggacgcgggcatggccgcattcacgtccgctccgtattccagcagaatatgtgcaatttgcagtgcggcgttcggagtgttcaggttcagggaaagaaggggcggggccatttccccgcggaaattgggatcgtacccggcttcgcaaagcttgcggaccagcagggggtatccggcggccgtggcccatgtgagcagacttgtttttttacctttcaattcaggctggagggaaatatccgcaccgcatttcagaagaaacagggccgcttcctcatagggtgctcctccaataccggccacacaggtgatgacgaggggcggccagcccagcggccccggtttattcacatccgcaccgtattgaatcaggagattaaggcaggagagcctgttatgcaccggcaggggcgtggagtcgtccatgcctggctggcaggcgtaagtcaggggggtatttccctgttcggagtccggaatggagggaaaggcctgttgcggcaggatgatctggacgttcgggtccgcatggcgctgtaaaaggcggttcagcaactgcacttctccgagcccggcggcgagatgcagcagggtttcatgggatggagtgatgcagcgtccgtctgcgctttccgccgtgtcccgtatcatctgaagccgttccctgatttcgtccttcatatattggcgcatggaaacttcggaaaacatgtgccagtcaatatggcgtgaattgagggaaagcccgcggtaaatgaaacgttccgggcttcgatgggctgtgaaattcgctgcggtaagaatttgttctttttccgcttttgtccagatagggttgaaattccattccgcgggagaagaatcattcctgttcagccagaaaacagcgaaagccgcggcaagagaggcaaaaaagctcaaagctccaagaaaccagagagttttctttcttaaagtcatgtgtatcataagcaggggtactgcgaaaggccatgatgcaggaatccataactccgggcaatgaaaaaatagtatgagcaaagaatgcccggggcaaaccatgtgggaattcgggtggcggattgcaaattcggatacaattcaaataattggagttaaatgatccacgccataaactccataatttttgtgaagtccggcccatgacaccatattttccgtttccttcgtaattctctttatccacgagcttttttcccagatgaagaggaaaaaaattctcctccgaatttgcaattcggtgtgatacgctaaatattgcggatgtgcggatggtttcaaattatttgcatttgccgctgctgcactcacggtagaatgaaggaagctgaaacttatggaagaaatggagattctcccgtaaaatgatggagagaactgtatccctgctgctggcctcctggtctttcctttcgctgtccgctccatgctgtctgaagccgctcttgccctggaagtaaggataaacgatgattctggcaacgttatggattccgtcaaacttattgcgtccgatatggatgggacgctgcttaatggaaagggtgaattggatcctgcgttttttcccttgtttagggaacttgagcttcgtggcattcgttttgcggcagcaagcggccgccagtatgacggattgctccggacctttgcccccgtggcggaccggatgctgtttattgccgagaatggcgcttatgcggcggcgggtagaaaagaatggctgcttctggacatggatcatgaaacggtagccggtttgattgccgggatcaggcgcattgaaggaacctgcatcgtcctcgcagggcgggattccgcatatattgaggacaaacagccggaatttgtccgggaggcccgcaaatattacacacgctgtcaagaagtgggggacctgctggacgtgcggggggacaaacttttgaaaatagcagtatatgacttcctgggagccggggaaaacagttatccccggctgaagcatttggaacatggcttccaggtggctgtctccggagagaaatggatggatatcagccggaaaggggccaataagggggccgctctggaattgattcagcggaaactgggaatttcttcggaggaaacgatggttttcggggatcagatgaatgacgctccaatgatgcggcaggcgcgtttcagttatgccatggcgaatgccgtgccggaaatccgttccatggctgcatttgaggccccgtccaatgaggaaaacggagtgatgcaggtgcttggaaagatgttggacgcccattttccgcaggaaagggccgggaattgcaggaaaccccgtttctaattgccgtgtaatggaataaaatcagggttatgttgatattattgtcagatttttttaatatgctggcgatggccgtgttcgcttgcattggcggtgtttttctgggaatgggctttctgctgcttaaattggcgggaatttttttcggaatattggcggggtgtattattctgatggaagcggccggaaggtggatttcccatttgatgggggcatgagtccgttattcccggcaatgaaggggattcctgtacgctttccgtgaggggagggctttctgatagctgggccattgccgactgctgttgttgccggttcattgccgaatgctgaagtggaaggctgcatcctgcctggattctgcgtgttaaaaccggatagcggagttttgtgataaacagacgtttgccgtaagatgccctggaagacagagccccgcagaaaggaagtcccagggatgtgaaatgccgggcgtccccatggaacggactgttgcctttgtactgtctgacagggcaggagacggaattttaccggcccttccgtcagcatgaaagctgttgtcctttttagttttgctttttcgcaatgtctgtggtacacccgtgccagacgtcatgaatcaggaatttttttcagtactcgtgcaggtggcggccgccctggggctggccggcatgatcttgttgctcagtatcttgatgggcaagcgttcttccgtgcgtaaaccggcggacattccctacgaatgcgggatgattcccatgggggaaggcgcccccatgttctctgtaaaattctatatggtggccatgctctttgtcatttttgacttggaagtggtattcctctacccctgggccgtcaatttccgggactatattatgatgaatccggaatcgttcacggccatgtgcattttcattggcattttgctggtggcctacctgtatgcgctgggcaagggtgccctgaactggcaccacgatccccgttgaccgtttttgttcccttttaccaacgccgtgttccatgaaggaatacggcgttttttatgtgaaagaaaaattgccttggaaaatggcgggggagaaatatccgtaaatcctgtcctttttccggatgcctgtttgcgtgtaaaatcttattgtacaaaagatgatttctcttgccagaagaggggaatagggatagcgtttgcgcgatcaggaaattcatcatgaatgtgcctcttcctaaaacgacgcaaggtgtttatcgtctgtcggtcagtaccttttattttcttcagggtttggtgttcgccagttgggcatcccgcatcccggacatcaaaagtgcattggggttgaacgatgccgacttggggtccgttctctttgccgtcccggtggggcagatgtccgccatggcgctatccggttacttggttggccgttgcggtagccggaaaatactgatggcggcatccgtcttttatcctgccgtgcttgtatgcctgggtatggcggggtctttctgggaactggcggccgggttatttttctttggggtagccgcaaatctgacgaatatatccgtcaatacgcagggagtgggagtggaacggctgtaccagtgcagcatcatggcccggttccacggtttatggagcctggcgggttttttcggagctttgctgggagctgccatggtggactggcatatttctgcggaaacgcatttcatcgccattttcctgatatgcatgattattctgaccgttttttccccctctcttctgccgagggatgcccggcgttcctcctcccagggaggcggcatgttccggagcatggatgcttatgtactggtcatcgggctgatcgccttcggaagcatggtgagcgaaggaaccatgtttgactggagcggcgtgtactttgaaagcgtggtaaaacccggcccggggctggtgcagatgggatacgtggcattcatgagcaccatggccctggggcgttttacggcagaccgcctggtgatgcgcttcgggcctgtgcgggttctgcgcgccagcggcatccttattgcctccggattgctcgtctccgtcctgttcccgatgctgtggtccgccacgctgggctttctgctggtgggttttggcacttcttccattgttccgctctgctacagcatggccgggaaatcccggaaaatgattcccagcatggcgctggcttccgtttctaccatcggctttctggggttcctgatggggccgccggtcattggtcatattgcccatgcttcctccctccggtggtctttctccctgattgccctggttggactggggacggcattcattgcccctttcctcaagaaatataggtaatcactgttaatgatatgcctatattgtgaaatggtgcgcctggcaggactcgaacctgtacgcctttcggcaccagatcctaagtctgaatcattattttaattatcaattagttaagtttctgtacacagtttgtacacactttcggtttgtcaatgaaaatgagctatgggatactttcaaccgtgaggagatcccggaaaaaacattatggttcacatatctctcttacctgtagaatgcaccggggaaagaaaaaatggctggtgcgcaatatgtcggtacgtccgcatattcatcggctctttgatacctatgaaaaggcatggggagcctatcaacggcttctgcatcagtccttggaggatatgttgccggaatacttgcgaaagcaggagtggagggaacatgttgatgaacatgattacaatgccattcttttatggcgagagttcaggaacatctatgatgaagtaacccagcaatcctcccttcctttgtatttggtagtacgggaagccttgaaaaacctgaagcaggaaatagccaacggtgcaagttatggccggagagacgctgatggtaactggattgtaacgcgaacggaccaggaaaatctggagcgattggagaaactgacaaatttgttttctctgaccaggttccttgccaataaaacagaacaggttaaggtcgattttaaaagaaagtttggtcttcttgcagaacaatatcgagaggttatcgacaaaaaacttgaatcaaatctggtcaagaaagcccatcatgacagcatggtcatggaactgcaaaaatgggcacagggatgggaagaccttccgctcaatcagattacaccggacatgatcgaagaaaagctggcttcattccgatatcgaaaacaaccgctcagcaatgccactagacggcgttaccgcacaaccctacatggattttttgtctgggcgcagagcagggacctcattgcatataacccggtcaaaaggactcttgccccgagagctgaatctgtcgagattggcattatctccccgggcgatctgaagaaacttctacaggcagcgcttgatcatgacaaaggcatgttgtttcgcttggtcttggccgcattttgtggcctgcggcgttccgaatgtgtcagaataacgccagatgccattcttgatgaaaaggatgaagtatttgtctcggcatctatagccaaaactgggaagcagcgttttgtaccacttcccacagcagccaaagcatggctcgctttggcgaaatatgaaccacctcctgacgaaattgacagattacatgagaaccgccatgggcgttgcctcaaaaaactggcagaaattgcaggaattgttctgcctcataacgccctgcgccattcattcgcttcatatgctgccgccaagacacacgacattccccgggtgtccatgtggctgggacacacgagctccaacatgacggagaagcactaccgggaaggtgtgcgagtagccgagggcgaggcatggttcaacatttttccggaaggagaaacgaaataaatgtgatgtagtcgacgacataggcttgcttcgcctgcatgtccagggcttcattagcggctccctgaactttgttggcaatcgtatcgattccccctgtaggaggggctccagccttcgtagccgcaggagctatgcctggtgatggcggcaacgtaggtcctacgggacgccgggcaagttgatttggcggcatctgtggggcttgctgtgggggcattgaagcagttttattccaaggctgtccccatactaatccgccagaagaacgtgcgagaggctgaggcgaaggcgctccttgtatcttgggttgtgcgtttgcagttctgtaagatgacaagtactgctgagcctcacgacgttgttgtacctcttgctgattgaattgtttaaccttgtctaccgcaactagggggttagcaagagccgcaccgccgggaatcatggtcgccaaattagtaacagcattactagtcgcatcctgccacgacgcatacttgttaagatcctcgtcgctgaactcttcgtcctggtcagtggtataaccggctggaactgagcctgtattcgcgtaggatgtttgagcttcagcttttgggtcgccctcagttggaggggtgactttatttgctacggaagagcctaccaataccccgccaaggccaccagcgcccattcccagaatgccagccagagctgtggctgtgtcgcctgcgccaagatgtcgtgccaggtgcgcggctcctgcgccgccgcccagggcacctacggtgcctcctacgcttaagcaccgagagcttttgccaacagattggcaaggccgggagatgtggatgccacctttgggaactcgacaacattgtcagactgttgagccttcgccgtctgctgggccttccattcctcgtacggaataagcttgcccgtttcagggtcgcgcttgaaggagttggctcgtacgttcttccgagcctggaggcgtacgccccggttgaggccttcgatgagggtggggctcattccgggcatgtcgatgggcagttcgacttcggcggccgtgttcgggtctttcttggaaccgggcagcttgagcttgattttgcccatgtcggccttgggggctttgcgggtgaggtacgatttctggagttggaaactaagactaagttggtcttagctatagaagtggcccaagtagtgcgctgtatcataacgctacgcggtatgatacagcgcactacttggtaaggggagaaaaattattttgaattggaatgaactctatatttctcataatgactcatatattgcgcatatttcttgtttttgattactatatgatacatatttctctcatgaaaaccacatccccattgccggggccagtgaaagtggcactcaagaagctgggagcagacatcagcgatgcccgtaagaggaggcgtgtccccacgacgcttatggcagagagagcctttatctcgcgttccacgcttggacgtatagaaaagggcgatccaagtgtctccttgggcaactatgccgctgttctgtttgtgctgggtctgactggccgtctcaaagaccttgtcgatgccaataacgatcctgtaggccgagctcttgaagaagaacgtctgcccaaacgtatccaccttcccaagacccatgagtgatactcccatcgacgtatttattgacctgtcttccttcccggggccggtacaagcgggcaggttatggtcgcactttcgcaaagggcgtgaatctgcctccttcgaatacaacaaggaatggctcgcaaatccgcacagatttgctcttgaaccactcctccctctggctgacggcacttttcataccaatcccgggcaaagtgtattcggagcgattggcgattccactcctgacagatgggggcgcattctgatgcggcgggctgaactggctcgtgcacgaacagccaatgaaagcccccatacgctctccgaactggactacctgctcagggtaaacgacgaggcaaggcagggagcgctgcgcttttcacaggatggaggacaatcgttctgcgctcctccggggtcaacaccaattccgcctctggtcaacctgtcccgtctgctgcatgccgctgatcatttctgccgggacgatgaaaatgcagaagacctgcgattgctcctcgctcccggttcttctctcggaggagctcggccgaaggcatcggtaaaagataagaaggggaatctctgcattgccaagtttccccggcacgatgatgaatacaacgtcgttgcatgggaagcagtcgccttgactctcgcctacaaagccggacttcaagtcccgcgtttcgaactggagaaaataactgacaaggatgtcctgatcgtctggcgttttgatcgcacccgggaacagcgaagaatctcctacctgtcggccatgagcatgttgggagccagggataacgagcaacacagttatcttgaaatcgtagacgccatacgccagtatggtgctgcgcccagacaagacttgcgccagctatggcaacggatcgccttcagcgtcatgatttccaacacggacgatcatttgcggaatcacggatttcttcagacgggaggaacaggctggtctttatcgccactgtttgacgtaaacccgactcctgaagatatacgccctcgctacctcaatacggctatcgactgggaagatacatccgcatttctggatgtcctcctcagcatcgctcccgaatgcgggattaagacctctgaaacgaatgacctgttggaaccgattgcccgggctgtcagtcagtggcgtcaggttgcggaatcattcggcatcagcaaacaggagcaggatcgcatggcatctgcctttgagcatgcagatggttactctgcgatattaacgtaggaatcttatcggtataattgtcccagcccccgtgaatgtagtatcaagatgtatcaggatttcagcgtagatttcgttgcgatagttaacagattgtccttctcaggctggcaagggcattgtaaaaataagtatgctaattacggataaatttttcgtccaatacaattgaagagatcgccaaaatattgggcgaagctttgactggaggagaaattgcccggtttcttcgggaaagtaacattacagagattgattgcttgagtacgaccaagtggcgcaggttaaatgccagttttcttggaagtcagatttccttacaaaatgcctcggctatttgcagctgtattgagaatatttttagtccaatacgctttgtatccagacaggataatttcgaggaataccaaaaagcaattaatgttgtattagcttttgaagggctcatgctttctttggaaggaaggctgtcgccaaggccaaaggtagcaacattgacagaagcacagagacgagaaaaaagactccatgaaaaactggttcaacgtggggctcatgacaatatattcaagtattgccgtgcggagcttatagacactgtatttagcattgatcgccctctccttgtgatcaatggattatgtacagatagcgaaaaatccgagcataaaggctttgctacccttttaaagggaatctacggaacattcagaaatcttttgcccatgcggcaaaaattaaatgggcgacaagcgaaacagatgctctcgatattctgagcacgatttcttttgttcataggagattggatgaggcacagaaaacatgctttgcctccatttcgtaaatccggaatcttcatatgacagataaaaaacagctcttcttcatgatgaagaagagttgctgaatgacggccttatccgtccctggcttccagcgtcctggcaatttcctcggctccacgcttgtacaccgtcacagccaacaactctccgtcgagaaagacggcccagaagcgggttcccttgtacttttcaatcgtcagcatcaggcaagtcctcctttccggggtggtggtgtgaggcgatcagttttcttaacacggctccaatattggattcatatatgtctcgcgtatgcttgttacaagctacggcgtacaggcatcgagcatcaagaatgtcgatggtttcaccacagagccgaatgcagctttccaggatatccaattccgtctccggaatcggagaagccagcaggatgctttcatcttcgtccagtgactcttgctgttcttccgtcagctccggaaggttcaccagagctgtcatggacgacccatgaatcgtcagcttgctcagccccagcgaagaatcattctgctgactgttgtagagcgacacagccttttcgatccggcccaatagttccgtgtccaattccatgtacacatacggagcatccgtatagtatccgctcgttgaacgcagttgtgcgatgaggggtatcgttttcattcttctttgttccttcctatgggggttacttgtagaagaaggcgatgactcccaggatcaacagcacggcgagcaaatacggagccacggccaccagagccgacaggatgccgactacgaccggccccagcaaacacagcagtacgagtgctaccaaagcgatcatgatgtcttttatgttcatggccgtgttttatgcggtaactcttgtccgggatgatcgacaaatcggagcggcagcggacacccattgcttgagcgccaaccgtccggcataggtaatcagccagcaattagaccgaaacaggaattcctcttccttcgtacggatgatgaactcccttccggccagaccacggacggcgtgcctgacactttcctgttcaatgcctcggcattccgccatgatttcctcatcgcttcgttcgaagtcaccgtgaaggtacaggagaatggacaactccagtccggtcagggagggagtccgccccatacgcttcactctgagatgatgttttcttctcatggtcgtctcgagtcagttgtgcagggtgtagctgtcggccagatcccagagctctcgattcagtcgcgtgttgccgtcaatgccgttgagcgcccgcagggaacgacgacgataagcgcccccttcctgtggcttcaagggtgctcctccccggatcaggttttcctgaacccggttgaagcactgccagacggtagccgaaccacccgccgtaaagccgatatcgttccatcgccgggccgacaaaagagcttcgggacgaatcttttgttcatagtcgtctcccaggcgtaaccgggccgcgtcatgaacaaattctacctgccgtttgtaaggtagtgcgaccccctgcatatggttgatgccgtccataatgcggggtgtttcttcggcaagctgaaggctggcggcaatcacatcttcccctgtatgtcccatgtggcggatattgatggcggcaatgcgtgccccgacaatcagaccgttggtgcagaccagccggaagatccctgccattagctgataggaacagctgccgttgtgactgttgatcatgaccacttcaatgcgctggtcacgggcactttccagaacatctcgatgggcaaagcggatcaggtgtttgcgagtgggagtgccgtccggcttccgggtacgctgttcctgggctccgacgacgaggaacccggccttttccatctggtcgagcagtgaatcggaggagacgaagcggtacttctccgaacgactgtcgtcctcgcggtcggcaaagacggagggtgcgacacgccggatctgaagtctgtccagagggctattgtcgcgattgcgatagagttcgcgtgtggatgtttgagtattcatatgaattgatgattggtttgttgcaacaaaaaaaccgcctcccggaacaaagccgggaggcgggcacagacaggaagcagagaatctacttcctcaaggatatatgacgcgaggagagggggattttcattgttgtcttcacatgaataagtctagatcaaacatacatgcctttaccccccatgtgaaccaagaacaaatgagcagtccaatggtcagtagagaagaaattatccgacgagaaaatcctttgcagtaatcacaggcagaaagacagttatccttccccccgccctcaattggtacactccgaacgaagcgatatacctagagcttgggaagaatatatcgcaaggaatacgggcatcgcaagttcgtagaaacaaacggttcgaatctgaggacagatttcctcaccatccacctcatacaggactccaaactattggaaccaaaaggattaaactacctcaagcttaaccttgatcatgctgttgcatttagtgcttgctcacgagcacagaaaaactgactatgcagccccgcaagaacgcttatttgtcttcattcataagacacatgcaagcatgctcatctttcaccacattgtgctttaccattgatcacttatgctatctatactcaaaactgattacggctcactatacgaaggcgactgcattcaaatcatgtcccaactaccaagtgaatctgtcgatttgatttttgctgaccctcccttcaatcttggtaagcaatattcctcaaatgttgatgacaatatgagcgaaaatgaatatttggaatggagctatgcttggataaaggaaagcgttcgagtcctaagaacaggaggaagtttatttatatataatttacctaaatggaatattcctttaggtgcttttttaatgaaaacaggcatgacttttaggcattggattacaatagatatgaaatataccttgccaattcctaaacgtttatatccgtcacactattcactcttgtactacataaaaggaaaaagtccttcaattttccacccagaccgaattcctctagaatgttgtaggaattgcggtaaagaaagaaaagattacggaggttataaaaataaaatgaaccctaatggtgtaaatatcaccgatgtttgggacgatattcctcctgttaggcattcgaagtataaaacacgcgaagctaatcaactttctctgaaattgatggacagaattatctcaatggcaagcaatgaagattctttggtattagatccatttggcggttctggaacaacctatataacagctgaattattgaaacgtcgatggataggaatggagcttgattgtgctccgattattgaaagatttcaaacaattgaaacagaaaaagaattcatgaaaatcatatatgaaaacaaaaacattctttttactgaaaaagatttaaagaaaagattttctaaaggagaagatccaagtaattttaaaatagaagaagtaaaaaaaataatacaagatcggcaatatccaggaaaataaggcttcccactatgcatcaattgtgattatcaacaggattaataaatatagtttcttttttcgcatttccatctccaccacgagttaaataatctatagaaggatcttctgtgatcttatcgtgttcaacaacaaaaatagccagaagtccgcgtttaactttttctccaattaaactccagagttctatataaggccttaattcttctatatttcctacgcgatccgttagatgcctatacaaatcacggctcggaactattaatatcccaatggtaaaaaatcctttatagatagctagagcgattttatttaatgatctatggctcgaagatatattccctgtttcccattccagaataatgttttcaccagaattgttgattttcacaaaatcagctttccctacttgccactcattctttttatctgttatacagacctctgttttccaagttctatctgatgctgtgagaccggaacaaaatagttttttaatatgagccactccatttcttttgtcgcacttaacattttttccatttttatccttctctgatgtcattttagcccgaatgataaattcgttttgtccttccgggttgaccatgcgtttaatggtatcagtgatatttgtttcaagttcttcccacaattgagaccctaacactcccccttgatcaaaaattataattttttccaataatttcatagtggtaaattatgtgtgaaaaatgcaatatctttatgtaaagctcgcgctatttcgcaaaatacgagaaatgaaatatttcttttccctctttcaatactgccaatataactacgatcaagattagataagtcagctaaatcctcttgagtcaaattctgagctaaacgttcttgtcgtattctagagccgagctctttcaaaacatttggaatagacatttttgtattattgcgccatgatgactttgagtccacggacgatgattcccattttttgcttaagttaagtaaatatatagggagaataaatttcaatatacgacaaaaagcattaactaccagcatatattaagcacgctatgcgactgataatccaagctaatagtatttctcgagatcgtaatttggccaaaattcgtatgtagatatggaggcttaagcagtccgacttccacttccagaggcatcagtgaagtttggcaaatgaccaatccccgacgttccagcaagcgaatgatttgcctgcccagcccccgttcttccgagaacaatctttttttcgaaccataactctcatctaccagcacatattcttgtatgctcagtattactttcacaggagtatctcaaagtcataaaatgattgcgtaaatacacgttttatttatatttacgcaatcaaataacagaaagaagggattaaccgtcagatcctggatacaggaacaggcaattcaaggccgccttttttacccgtgaagaggtcgatccagaaagtgctgcccgatacgtcgaaacaaacagtgacaattgggttattgcgtgcccgggaaactcgcctcatttccattgcatggcaggggtttatctcactcttccccctgcttacgccaagcagggaacattgcctgtcgccatgtatctggacgcattgatgaagtatctgaaccgcccctattgtgctgctttactcaatgctgcggcattctacggagccgctcattagagtccccaaacctttgctgtcatgacgaccatatccattccccggaccagaacccaacatggtacacgattgaattcgtgggaaaaagggagttcagccaaagcataccttcagaattgctcaaggagttcaaaacttcttccgaatacatttaggtttcctctccggaattcacggtcttgacgctagttcaatacgccgggcgcgttggcgggctttcccgaatgtatattccgatatcacccaaattcacaatataatgtgaaatatcatgttttgaatgttctgcccactctgttttcttgtaaaaccacaatatagtgtgattattataaataaaagatatctgccatcgagcaagcacttactttgcgaagaagtatttcgatgatcaaatcccggaggctttcctggttccggaatccttggatacttcagataaaataaagacttttgccagagccctccatattgaaagactccggcaaaggggacacacggatgtttaccgtattccagctacagcttcctcctggtgtcgggcatagttgccggaggaggaattctttcgggatgttcctccggatgtttccatcagttctttgatcagggtagacgcttccaacttgttcaactgagagatgcccctgccgaaacagagtacggccagatcatgaagtgcggaatcgttcatatcacttttacgagccagcgacagaatgatctgccgttgttttttcgaacaattccatgccggttctccggggtgagatgtctgggaattcgaagacggcggtacaggcatccgtggaacctgacgcatggcaggaagcgtagcaccggatacacctcctgaaccataggaagcatcaggaacgaacccgacctgttggatctgggtatcgacggcagattgaagagagccgtagagtcgttccgcttcgagaggcaattctgatgtattgctgatttcggttttgatggagacctcgaactggtgggaggaataccccggcagtccgaggcgtttgctgtagttggcgatgagtttgatagccatgatggtggttctttcgttgttgatgggtggatacggtaaagccgccatgcccggtatgggagcatggcggctttgtgaaggatgacagacaggtaattacctgtgtctgatatatatgacggtaggagaggtgttatttcaacatgactctctggcccctatcttccataacgttcatgttgccatgattgttatgagatgaataagccaatgggagagggcaaggtatcatttaaaggcagtgctagataactcaaagatcttttagaaaataacgagcgcttttcctcagcatgtcggcatcttctgctctgccattttctctcaactttgactccaattcccgggttctgtcggcgagggcattcaacttgtttcgaatcccggtattcctttgttgaatcgctccctcaagtatccgggctttacgcctggcgttttccgctcctgacggatcggtacggccagtaagagcactgggggtcatgcatgagacagcccatgattcaaggctggatatttgcttttcatctttgatgttctgtttacgaaccagggatatctcttgctttgacctataaaggtcggtaacgacagaagcgagatcgttaagtagtagttgatcatcctcttttgtgtccttcagagcccgcttaatattggcgatggacattttccctgcattaagattgccggacgatatatcttgtaaaaccactggtttttgagcctccttgggagaaagggaaatcttttcctttcccttcatctccttactcttcgcgtttgccacggcttcccgcaatgcttttacactatccgtatgtcgctcatcaacagccgacataagagctggttctctttctttagtctgcacgttaacgttcgcttctgtaaccttaagacgtgaatactcatttatcatgttttgtcgttctgcacttctcatccattccatggacgtgccggggagtctgcgaaagaagcatcacgtctggcaatctcttctctaagtgcatttgcgttgatttgttctctgctaagtggttccttgtctccatatatcacttgtatcgcatctcctttgttggcaacctccagggaggcagtactccctctcttactcttttctctcaattcttcctttaaccggtctcccgtttctttagaaattgaatatgccaactctaaacttgttttatttttcttgttcttgatcgttacatcagtgttgcttgtaacaagcagtggaaatacatcattcgctccgaacttgtcataagtaccccattcagaaatatactcacaataaggttctctcattattaaatgtaatggcgtatttccattaatatcctgaatgtttacgtcaatacctttttctgtaataaatttaattcgatcggcctcgaatttaagccctctaaaatattcaagttctccaaagtcttgccataatatataatgaagaatagtttctccgtttttatcctttatatcaagaatagctccattctctataagatattgaataatatctttgtttttaatgtaaaataatgaggttcttccaaagttgtccttgctgttaatatcagccccattagcaataagcaatttagccatgtgtaagttgtctacctcatgtaagggcgttttccctttcgcatcacgacaattgacttcagccccatttcgaataagaagatcaaagacagttccccattctgaagtataatcggagtctgaacgcttcaccaaatcgtgaagtggagttacaccatcaactcctgtgattcggacattggcatgtctttgaattaactctattgctatttggggactttcacgatattgagagcaggcgtctcccaatagtgaagaggtatgtttccctacttcatcgggattggctccacgatccagcaatgatttaacaagatcatactgatccgtgaagacagcgttatgcaatgctgatatttcatttttagagatatgagcattcggatctgctccaagtttcaacagaagctcagcaatttgaggttttctctgatagacagcaatatgcaaggccgtgggatattcgcatgatcctcctatataaggatacctcgtctcacaatcattaatatctcctccgtttttgatcgttaacagcattttacctagaacaaaatctgcttctttttcgggagatagtcggtcaacttgcctatctatttcttgcttatctgaggatgttaacttatcacaagacgacagaaataatgaagaaagtaaaaaaagtgtaatatattttttcataattttaaagcgtccatggacttggattatttgaatgtcttactagtcctgttccgccacaggttgggcacacaataattggtcggtttatattgtatccacctgcccccgcagtacatgttccagctcccctgcatctgttgcaggtctcaattttattggcttcacgttctgcctgaattctgttattgtacattatcgcttgttgtgccatttggcgtaatctttgatcttggagctcattcgaaatttgcctttgtgttctagcgttttcccaggatactatatcatcattgttttccctatgattcagcattcctattaaaatcagaaaaaacaagcccgttcctattgcagtataatagctcaatttccatgatttatagcctatattcagtttcttcaatccccatcgatggatctgattcagaatttcatggttctgaagccaatctgacaaggacttgtattcctttgccgtcgatgccttcatttcatctggagaaaaggctttctcgtgttgttccgcatgagcagacgatgtgtttgaatgggatgccgtatcttctgaaccggaatgtggaggaagagacggcagcttggcgctggaaataaaccattcaaaggcgtcttcacaggaacgccattgatcccatccttctgtccagacgtaagacccgggaggcagagtccgctgatgatagagcctttttagctcgtcttcggaaaaaggtccttcctgtgtgctgtccggtcgagcaaggtaataggaaatcataagcatcaaagtgtagattcatgaactgaacgagagaaagcgcatcagaggaataatggcaacagtcctcccagaacgagtattgaaacaagcataaagcccaggatggcaaaggaacgtttccatgagcattgaaagttccgggcaaccacaaggatgatcaggatttcaacgaagagaaagagccatgattgattcacccaattgccaagcatatcgaagatggccagaccaacgcaccacgggatcaatgttttacggcttattgtaacatccttgggagaaagcagcacaatatacccgtataacaacagaccggatatgatgctgatgaggaatggaaacgaacccgcagaagaagagtctttcacggttttcatgaatgcataatattcatccagttctctctgtgcccttgtatccccggcatttgctttctgttgcaacttaccgttggtccactcattggtgcgctgagccatagcaagctgctggcgcaaataattggcctggggcgaatcaccctttccctcagcttcagcaatagcattctccatccgtaggactcctatagcacgttccttggctgtagtggcccctcccatgtactgctggtacaagcgattaccatattgttgcctcgcctgcgccatagacttgtcaaagtcatcatccattgcggttctctgcggaggagaaccgggttcatcttgagagaacgcctcaggggtataaaaaaggaagcaaaaacccatcagcagagcagtaagaatgctcctttttatcccaagtccttgtctttgacgtactgtattcattgttatgtttgtattaattccatccggacaggattttgcctgcatgataagatgcgaaaagagttagagccaaaataccacaaagagtgacgtacgaatgtttctatatctctacacccaaaatcactgctgccagaattcccccgacaagagaaattcccatactgatgcctaataccccgaatgatttacccagtgtgaaattcagaactttatgagcaaccaggacaatagccgccagttccagcagagcaagaaaacctgagtctatcacggtaaggatgagatcgaccacggcgaatacaatggcaatcgtcttgaagtccttgattgcagccggttctttatgctcggacaaccagtagagcgccaggaagatcgaataaccaaacaatccggagcaaatcaacgtaaacagaatctccctgccgggttctgttttgctaagttcccgagcgctcttcccgacaaggatggcgcaggaggacaatagggaggtggtcacaatggccagtcctgtcgctaacccgattttatgtatttcatttctcttcatgtaattacatgtcgttggttattgattgcagaacatgtcttttgaccctcttccagttgcggcaggccaacgttcgaatcccggaatccgactggctgatcaggatgccatgcgctgcccgttcacgttccagaacggtgcggcgttccttctcggtgagagtaccgggatgaacgacctcgacgatcacaggcgtcatcttcccgtcggggaaacaaaccatgcaccggtgctctaccgtttccatcccgtccggccaggtaatgactccggagctttgcacctccttcagggaatgccattgaaacccttccgatgaatcattcccatggcaatccggatgacggcagtccgcgcagcggtaccccagcggctctccgcataaatcgtccaccagaaccttgtgtccgacagccagccctccctgacgatcggcctccagactctggacgacataacggtgcatggcccgttcgacgagcatcagttgatggcctccgcatcggggacaggtgaactggatgatacttttcattgccggcatctcgtttacattgcctgtatatctcctttttacgattttagtcaacctgaaaatctcattttaatctcaaaaatagggatgttatataaccatattgccattcctgagcgatagtgatacattccgaagtatggcaggagcgaatcaggatgaactgaaaatgaacgtcaagctgtggctcaaggccaacaacttcgactacgcatggctcgccgaaagatgtttcgtgacggaagcgaccgtccgcaactggatggctcagaaacctattcctgccgccaaggaacacatcatccgggaactgatcaagcagttccccctgactcttcccagccgggtacaggtggaagaggaaacgttgatcaccctgaagctcgacccggatacccgcaaggttcttgagaagaaggccttctcccagggcaagaccttgaaagagttcttggccgatgaagtgccgagacttggcaatccccctctttcctgaggctatggaaggtcccgacttcgctcttcctccgggaaccttgctcggtaactacaaacttctcaaggtactggaccggggaggtttcggcatcacctacattgcctgggacaatcagctcagacgcaacattgttctcaaggaatgcttccctctggggctgtgcagccgggattcgaatacgggagagattatcccgttaccgcacgcaccccggcacacctaccgggcagccatggattccctccgcaaggaggcgcagacacttgcgtccctgaaccacgagcgaatcgttcgggtgtatgatgtcttcgagtctcatggcagtatcttctatgtgatgccgtggctggaaggaggttccctgcgggagcgtatggacgaagccgccatggcaaaaacatccttgatgcgcaggtacatgcgccgttcgctggcacgaatgtcccgaatacgctcgagcaattcatcaaagtagtccggcaacggtgtcgttccgggaataggcggattcttcaagcgttcgtcatcaatggtaaatcccttgatcatgtattccttcagacgctgggtcacccatatgcgaaattgagtaccccgtatgctattcacccggtaaccgacggaaatgatcatgtcgaggttataaaacgtgatggaacgtctaacctgacgcataccctcctggcgaacttgtaagaaatccttacaagttccttccctttcaagctcagtctcttcgtagatattcttcacatgcatgatgatattttgcacggatgtctgaaacagctcggccatcatctgctgggtcatccacaatgtctcatcatggatgcgaagatccagacggatgttaccatctggagaagtatacaataacagctctccgggaaccggggtttcgtcttctgtcggcagatgggtcataccttgtcttcttttcgattaatccatattgcaacccgaataacggcagtcattctggaacaacaagcccaatggagcatagtaaaaccggcatgcatgcaaacaaagctcacatcatccgacgactttcatcaaaagtcatcgctaccatgggaacatttcttgaaataactccaaccgctattttagaaaaatggataaacttgaaatagacaagtaggttattttaggttaatcatgaccgtatgaagaggaagcatacgggagaatatgagattacggcggtagcgggagaacgggtgaaggcttttattccttctcccttgcctcccatcccgggaatagacatcagtctcgaattacagcaatcgcatgaccaggctttgattgcggttggtgagctcaattccctgacttcccttctcccggactactcacttcttttgtattcctacgtccgcaaggaagccgtcttgtcgtcaagaattgaaggcacccagtcttcactgtcggacttgctggtgtcggaaatggacgggattcccggtgttcccctggaagatgtcacagaagtcagcaattacgttgctgccatgcagtacggcctggacaaaatccgggaaggtctgcccctgtcgttgcggttgatcagggagatgcacgaagtcttactaagaaagggacggggggaaggtaggaatccgggagagttccgtaaaagccagaactggatcggcgggacaaggccgggcaatgccattttcgtaccgccacctcctcaccgggtcatggaatgcatgggtaagctggaactgtttattcatgatcctgcgttttcattgcccgttctcatcaaggcggcgttggtgcatgtgcagttcgagaccattcacccattccttgacggaaatggtcgcttgggacgtttgctgatcactctgatgctttgcaattccggcatcctaaaagccccaattctatacctcagcctattcttcaaagtccaccgtcaggaatactaccgtcttctcagcgacgtaagatcaacaggggactgggaagcgtggctctcctacttcctcgaagccgtaacactgacatctcggcaggccgtgacgaccgccaaacaaattgcccggcaaatatccgacgatcggaagatcatcgaacaaacaggccgttcctcggcaacgacattgcttattttcgaatgttttacacgaaagctgattgccgacagcaaatacattgttgcggaaaccggcctgagcccggctaccgtcaacagtggtttggctcgtcttcaggagctgtacatcgttgcggaaataacaggaaagaagcgcgataaaatttacagttatgcccgatgcatggaggtgttgaatcaagaacttgattgcggacaaatatctgagatattatagttatctcaaaaatatgatttatagttaattttaaatttaaataaattatgcctttttctacagaaaataagcttgttatagctgtatcaagccgagctctttttgatttaaacgaagccaatagtatattcgaaaatcaaggcgagaaagcttacatggaataccaatgggataatcgaaaatcaatcttaaaaagaggggttgcatttcctttcattaagagattgttgcagttcaatggatcaaatgaaaaagaaaatcctgttgaagttattgttttatcaaaaaatgatccatttagtggattgagatttttcaattcttgcgaataccataaaataaacattacacgaggagtattcacggctgggcgtgatcccttcccttatatggatgctttcgattgttgtttgtttctaagtgctaacaaagaagatgttgataaggctattcaaatgggtaaaccagctggattgatcttacctactcaagctccagatgatcctgcaacaggggaattacgtattgctttcgactttgatggagttttagccgatgattcaagcgagcgtatttatcaggaaagagggatagctgaatatcaacaaaaagaacgagaaaatgctgggattcctgcgcctcctggtcctttaaaaggccttatagagcggctagcgaaaatacaaaaattagaaaatatcgaaaaaagtaaaaacacaaactatgttccaagattgcgtattactattgttacggcacgtaatgctccagctcatgaacgagtgattacaacactccgggaatgggggattacggcagtggaagctttttttctgggaggattagaaaaaaacaaagttcttaaaattttacgacctcatatcttctttgatgatcaaatggttcatctggaagctaccagcaatattacaccctcggtccatattcctttcggaattgcgaatcaaccaacgcctaataactaaaagaaagccctcctgaggaagactttcttggctattgcgactacacctgccacatgtcatccgggagaggagtcaacgataccccgtctcccggcatggacatactggccatgcggacgctccggctcagccatgcgaacagttccgggaacttctgatcattgatctgcatgggaggacgccccgggctgatgctgcaaagttccgacatatcggcatggccgataccgaagacgaacacactgagtttgcgggcagccatcagttccttcaatcgtccctccaactcccggttccgggtgctggtcggtactccgtctgtcatcacgacgagccagggctggtagtattccaccccatgttcccggtaggtacgtttacggttgtcgagttcggccagagccaactcgacagcttcacccaggagcgtttcattctcctgtgacgtggagatcttcaggcctgtgtcagattcccggatcggaccgaactccttcaccgttgctaccgtccgggcaaaagtcatgaccgctacgtcagcggccagcttggccagaggatcagcaagaatgtcgctgacgaacctatgaagaccagtattgagctcatccatccgggtgaccatgttgtctcccgtgacgatattccagttgaccccatcagcgtattcctgacggacgatgtgttggttgtcgccccggacaatgccgttcatactgctgctggcatccagcaggaagagaacgggaagccgagcgttggtgttgttgctgaactcgcgcatggcggcgagttgttcttgtttggtagggtgtgtagatgatgtagacattattgtttttattaatggttgatggtaggattctgggatgcctgattcaatgcgctacgacgcctgatgcagagcctgcacaggggacgggcatgagattgctgtaaacgccgtgcgacatcgtcaggagtctcccagaagcgaatgccgcagtctgagcagatgttgggtgtcatattctccagcaaactgcggggcgggcaggaacggtcgtgcagaagatcccggtacatgggctgatccctcctaccacccggttccatatccctgaggtattgatgaaaacaacgcgccagataccccggcatgacgcgtggacgcaaatcgcgatgctggatacaggtaagattgtgaccgagatcatcgcggagcttgcgtgggagatacgaccagacatagcgtccgggggtatcgggcgggtaggttcccgcaggtggtttgtacgaagcaaacgaatatggcaacacgccctttccggcggattccggcatgtctccttctaccccttgccgagcgaagggagacagaccgagcgccagcgtcatgaagaacaggacggacagggcgtagacatcgtgattacgagtgcgtaggaagcctccatagttgccgtggagctccggagcccggaaccgttccgtgccgacagtacagggatagtcttcgatctgcatactgtcgacatccacccagcagacggagccattgtctgacaccatcacattgccgggatgaagatccccaaggatcacaccgcaacggtgcagcgtatggacggatgccgacaagttcaggcacagcctagtcagatcgcaacggttccatgaggggaactgtttcttcagcagctccgcatgaaacgcgaaagccccgagcggaacaccgtccgcccggggcatcagcacgccgacaaaacgccgcagttcgtcgtacaggatctcgcgcggccacgccacgcacggagaacgaataggccgggaacatatcaaccgaagcttctgctctcgccaacgcatccgttgcgttggatgatagagcttggcaacgagagttgtttctgatggcagatgaacggcaaagatcgatccttcgtgtattgcccgagaacgattcgtttcccccggcctgagaataaaacatttccagtcgaatacttcctgccattgccgcagaacgtttgatccagttgcctcacctgacggtggagcgtatagatagatataaattaacgcaatgtattgacattgtatcaattatatataactcacaagatttccgttttacaaagcggccaaatgtgccgttcattgtgtgaatcgtatgacagaaatagcttatgaaataaggttataaacagcctgaacgtgtacacactttgtacacagattgggggcgttttatgaaatttgcatctattgcaacactcaaaataaatcctcttcaaactatttgtttaaagaggattatgaaatggtgcgcctggcaggactcgaacctgtacgcctttcggcaccagatcctaagtctggcgcgtctaccaatttcgccacaggcgcaacgaatgggcggacgcactctgccataccaggctctggcgttcaagattaaacaggagtttttacctttgacgcgcttgtgggaagcacctgtggtgagaaacctataggaaagttagcagccctgttgggtgtctgttttctggcggcattttccattcatgggcggatgtctggttctccaaaggcacatttactccggattagaaaggggaggcattgagtacgtcctggtttgtctgccggtaaaggatggaaaatccttagtaactgattttgtgagggaggttctggagaaaggaaagttttatcccaagccggtgttggccgccggtgatggttacggggcgcagtgtttcgcgtatgaggagggcgatactgatgccaaacaacgaggcgtgaaattaagaagattctcgagccagttaaagcagtcctgaaccggaggatggaatatcccggatattttcccgggcaggcttatcccatgatttgtgccggaaaaggaaatagtttcacgaacagaaagtccagcatccccaggcacagggcgatgcagacggcttttttaggggacaggagaggcgttgttttcagccaggcgacgatgccggcatgaaccgccagagagatgcccacagaccaccagaagaacggaatgcccgtcatggcgaagagggccgccagcgggtaggtgaatgccagaaagagtttcatgacagcttcccattcatgcccgcgcaccatcatcagctgcttggacaaaagagagacatacaggcaggaagggactacgacgcacaggatgagggaaacaacccctttttttgcataccgttcttcctgtgtgggaatgtacatgccgcatatactgggtcaggaggggaaatttgtcaaacattgtcctagcccggcggggcgggagcaatatactgacggcactgcgtatgtcgtcttttgagttgaattcctccttcaagccttccggagaccaggagcaggccatcggcaagctgctcaagtctctggaggcgggtaacaagcaccaggggctcctgggagtgaccggtagcggcaagacattcaccatggcgaatttgattgcccggatgaacaggcccacgctggtgatttcccataacaagacgcttgccgcacagcttcattcggagctgaagagttttttcccgaataacgcggtggattactacgtttcctatttcgattattaccagccggaggcgtatatcgccagttccgacacctacattgaaaaggattccgccattaatgacgagttggaccgcctgagcctgaacgccatgaattccctgatgacgcggagggatgtgattgtggtggcatccgtttcctgcatttacggcctgtccactccggaggattacaggaacctgacgctgcgcatgcgcgagggggatgtcatggaccgggacgtgtttttgaagcagctggtggaacgcctgttcgagcggcaggattttgattttacccgcggcacgttccgcgtgcgcggtgaggtggtggaggtgtttcccgcttattcggaaggtgaagcaatccgcgtagagtttttcggcgacgaggtggaacgggtttctttgattgactccgccaccgggcgcgtgagggaacggcttgggagctacacttttttcccggccaaacagtatgtggccgctccggagaaacgggcggcggcgttgaaggctatccgggaagagctggaggaccgcgtaggctggtttgagaagcatgggcgcctgctggaagcgcagcggcttaaattgcgtacggattatgatttggaactgattgaagagctggggttctgcaaggggattgagaattattcccgccatttgtccggccgcctgcccggaagcgccccagccaccctgctggatttctttcccaaggattcattgaccctgattgatgaaagtcatgtggcggtgccgcagctgggaggcatgtacgagggggaccgaagccgcaaaaatattctggtggagcatgggttccgcctgcccagcgctctggataacaggcctttgaaattccatgagtttatggaaaggcagaaccagattgtgtatgcttccgctactccggggccatttgagctggtaaattgccgtgcggataataagacgtatattcccgtgcgccgtgccgccagatccggagaaaaggctccggaagggttcaaaggaattttgtttacctctcccaaggacattcgcgttgctcccagcccatccacggaaccggtagaaaaatttgacccaaccaggcgttctacacccctgattgtagagcagattatccggcctaccgggctgctggagccgaagattaccatccgtccgttgaaagggcagattgacgagacgatcgccatgtgcaatgaacgtgttgccaaaaatgaacgcgtgctggtcacgacgctgaccaagaagacggcggaagatctgacggagtacctgaaaggggtagggttgaaggtgtcctatattcacgcggatgtggatgcgattgagcgtgtggagattttacgtgctttgagagccaggaagatagacgttctggtaggcattaacctgcttagggaagggctggatttgccggaggtttccctggtgtgcattctggatgcggacaaggaggggtttttgcgcaatgagacgtccctggtgcagacggcgggccgcgccgcgcggcatttgaatggagagtgcgtcttgtttgcggatgtgatgacggattccatcaaacggctggttgagctgacggattaccgccggggtattcaggaaaaatacaaccgggaacacggtattgtcccccagacggtgagccgttccgaacaggggcagttgaagttgtacgcagaggatgatgaagagtccttccgcgtagcggaggatgaagccggttatggtctggaagagcgcattgccaggttggaggcggaaatgaaggaggctgcttcccatttggaatttgaacgcgccgccttgattagggatgaaatcaggcagatgcgcggagaatatggaaaaggcaggggataatatccggcgtgatgaattggggatgagctttctggtaggatggcatgctgttttttcgtgatatttgtccatcttattcttggccgtcatttgacggtgatttggatattgggtttaacagttaattgcttaaagaattctgctgatgtgacgtcagtgttccggaccggagtctgctgtcaacgtgaaatattctaagaaggccttactccgatggggaagtatatgaagggctctttgttccagtcttttcttatatataagatttctcatgataagcacttgccgaagtggcaaagggtatggcggatgacagaggattcccaggctggcagcagtagctgtctgatcatcctttgccggttatgttccccattttatttcttgatgcagcaggctgcgtcaaaggcgccgggcaatgatggtcaggaggggcccatttgccatcgtctgaagaaaagatttgcataaaaaatacttgcgtatttggaaaaagcctgtaatctccttccaccatgacccgcaaaggtggtatcaataaaacccgcaaggcagtcgccaagcgtttcaaggtaaccggcacgggcaaggtactgcgccgtaaacagggcaagcgccacatcctccagaagaagtccagcaagcgcaagcgccagcttggcaaggtggctctggtggacgagacgcaagtctgggcagtcaagcagaacctgcctttcgcctaaaccgcggaaacgctcgactaatgccgagctttccccccgctgaacggggggccttcatgcagccttcttccgatgagaagataagaacaggcgagactgcagggaggtgaggaagaacagtctgttcaagatagaaatagaaataagctatgccacgtgccactaatggaccggcctctcgcaagcgtcgtaagcgcattctcttgcgtgccaagggtttccgcggtttccgcagcaaactcttccgctacgccaaggatgctgtttacaaggcttggcagtatgaataccgcgaccgcaagcgtcggaagggacaattccgccgtctttggatcgcccgtatttccgctgccgtccgcgaccgcggtctgacctattcccgctttatggaaggcttgaaagccgccaatatcgatttggaccgcaaggttcttgccgatttggccgtctctgacgaaaaggcttttgacgctatcttcgctcaagcgaagaaggccattgaagccaaggatggcgccgctcttcgcgcctgaatgtgcgggagtttccatctgttcaataaacattaaccgacagcctccggaaataattttccggaggctgttttcatgtccggacatggcagttccggacgttggcattttcctgtaaattccttatggagcaggtgttcgcacgttcatcatttagtgcgccagccagtttctcttgttgcagcgtcggttttcccatgcaggctgggaaaaattctgtttccgccagtgcgcatttttgttaagaacacaatggagctttaatcactgcttccaattccggaggcatttattgcaaaggctgttcaggggattcggacagaaaagcgggttgcggcgtttgatgccccgccggtttttctcctggtagaaaaaaggcgcttttattcgtccaggttccgggccgggatgatgccgcctctcccagaggcgccgctcgaaaaaagggaacgcggttttttacttgcggcttcagaattcccggaaggtaaaggctgttttccgggctgtcgggcaccttttgaaatccatttggaatatcagcatctactttgtcattaggacatctttgaagcttgttcaccggagaggcccgtggtaacctggacggcaaaaactaccatggatagcattctttccgtccttgccaccatcgccattattttcggcgtggtgatgttgtttaacttcatgatttttattcatgaacttggtcattttttcgctgcccgctggcgtggtctgtatgtggacaggtttcaaatctggtttggccgtcccatctggaaaaaaacggttaacggcgtgcagtgggggctggggtggattccggccggaggttttgtatccctgccgcagatggctcctatggaggccattgaaggacgtgcggagcttcccaaggatttgaagccggttactcccttggacaagattatcgtggccgccgccgggcctgccgcttcttttctgctggctgtgttgtttgccgtggccgtctggatggtgggcaagccggatgtggagatgggggtgactacggtcggttttgttgctccggacagccctgcggctcaggccggcattcttcccggcgacaagattgtgaaagtggacggccatcctgtggacaagtgggcgggcaatatggaaggcgtgcgggaattgatcatgctgggcgagcatgaccgggtggtttttacggtgcagagacctggacatgaaggagagatggaaatttcctgcggattccggattccggaaacgtcctggtggcagcgctccggcatgcgtcaggtggggttgatgcaggccatgccctgcgtgattggggaagtgatccccaattctcctgccgccttggccggattgaatccgggcgatgaggttacggccgccaatggagaacgcctctggaaccctgcagcactggatgttctgctgaagaagaatgaacctctcttgctggatgtgacggacagggccggggttgcaaggcaggtgaatatccaggggaagcttccggagaattggcacaatggtgcggacggttccctgctcaagggggcccagcctattctgggcgtgagctgggacctgagttccgtgggccgtgacgttaccgtccatccttctccgtgggcgcagatcaagcagagtctgaaatggatgggggataccctggcgaaggtggtggctcccggcagcagcgtgggcgtggagcatctttccggacctgtgggaattgccaatcagttttacaagatgttctctctggaggaagggtggaagctggccctgtggttttccgtggtgttgaacgtaaacctggcggttctgaatattctgcctcttccggtagtggatggcggccatgtggtcatgaatgccattgaattggttttccggcgtcccctgaatgtaaaagttctggaattcgtccagttcggctttgtgttcctgctgatggggttcttcctgtttgtgacattcaaggatgtgggggatttctttggcaagaagccggacaagttgcccgccccggtattcaaggccgttgcggattagttgcggacggcgttttttatcccggcctgttccatgaagcagtcactggcggcgcgtttcctgttccgggctgtggtgctggcgtttcttgtgtatgccatgctgcttacctggtggactcctttcactggggacagctttatgcattccgtgttcggggcggaccaccgccttgcttttcagcccgtgctggagcggtgctggtggtcatacatgcactggaatccccggctgggagagtttctcgctatttttacagctacggcgggaaaatggctttttctggccctcaatcccttcgtgcttctttccctggcgttgatgatgtttttcctggcgcggggaagaagggtcaattccggaaactggcgggatgtgctgctgtttaccgtgggagcgcttcttttgcttacgtcttcatccaggccggggatcacgatgttctggctgtccggagggaccaattacgcctggtcggccgccatctggctgggtttcctgtgcctgtaccgctccttatgggctggaacttcccggattagggacactcctttttcctggctctggataggcgtcatggcttttgccgccggcatgacgaatgagaaccagattcccgcttccctgggcatgctgttcgtgtactggtgttacgcccgctgccggggaatggttcttccccgctggtttttcattggctggggattccatgcgctgggcggggcctttcttctgctggctccgggcaatgcggcccgccttcattcggagacggcgggcggcgcagccgttctccattcctggggggagcgtttcagcgccattccggaattggtaaacgccttttatgaattcatgccgattcctaaaattttgctggccgttgccgctgccgctctgatcctgctgactgtggaagcggggataaacgcctggcgggggaaggccgggcggcgtatgtgcgtctccctgctgtttattctggtggctcatgccatggctatcagcttttttgtacgcgtgattccggcatggcacgccatgttttccgctacggtattgatgatgacgggaattctgggattgtacggggtatggatggatgccgtgcgaaggcggtggctcccattctgcgtgctgctggcggcggctggtccggccctgtgggtatgctccggatatctggatgcttttccccgtatccaccgccagtgcgaggaacggaaaatgttcatccgccatgaattggaacaaggcaagaaaaacattacggttcctccttatgattccgttcctttggccccttatgtttccgttatgtggcgtatgagcagcggggatccggatgaatttatcaatcgttccgtagcccggtatttggggattgaaagcatccgggtggctgttccggaaccgtgactgctttattctggccgttttacaaatcctttccgttttttatttgaatgcgggcaaatgtccgcggattaacaatccgatgaatgccaagttgtcttaataaaaacatattttattcatattaaatatgttatatatttctatcatattgatggaagatgatttatcccaaaaaaataaacgtaatacatgattaaattttcatgatttgccattgacaccggattgttaattcggtttacttcgttttgccatgaagaaatccttgttgtctttagctttaatctcaagtaccttgcttgccgtagaggcggcaacggtgcaaattgatttcggacgcagtgacgccacgacggacggcgtgctcaatatgaattatgatagtgcctccgccgctttgggcagcatgccgggaagtgtttctttggcatggagtacggcagaatggcctgtaggggataatggccataccaccaccaagacagttgaggaagaagccgattggaaaaatcctttcaacggcagcatgcctttcagcttgggggacacttttcgtgacggtcttttaacgcagacggccgacgggtccggctctttcaccgtaacgttcagcggtcttgccgccggggagtatgccttgtccatctttggaggtttcacaggcaaggatgtatttgccggtcaaacctggacgatcggaaacgccgatgcttccaatgccgtctggacaagcttcggtacagacgccaacggggactgggccgaagtttcttccgtgacgggtgataattccggagtccttactccggcgaacgcttccacctccagcgctactgccaataaagggctttatgctacggtagagaatgtcgtggtaggggaagacgggacgcttactcttacgattcagggggatgggagcaaggggtacggccttacagcccttaattacctttccctgacgcaggtgccggaacccgctacggcagcattgagcctgctgggcgctgctgccctgttcctgcgccgccgcagggactgaccggaaagaacagacctttgttatcaacgccgctccgtaattcacgcggagcggtttttttatttggcgtttttcctttccctgtttatgcagcaggtcgtttctatcccggcctgttggccggagcaatgcctgccccattccggagaagagctggaattggaatgaggcgcgggaaaaagcgggaaaacggacttgtccgggaagagggagttattgaatggggacggtttccttcaagcaggtggagacgatggtgcgcgtaatgcgctccagcggtattccggtgattctggacacgatgcgggcgtaagcgttcaattggtttgcatggcgctcgcgcagttgcccaggggtgtcggcatggtccgtcttgaagtccacgatgcgggcgccgcctccatcaagaatcagcctgtcaatgatgccggaaatccagttattcccgtcaatggcttcaatacgctgttccttcatgatgcgcgccgttttcggaggcgtgaaaagttcgcggatggatgggatttccatgcactccgctacgatgcgttccgcctccgtggcagggtggagagcccatgccggtttgttttcatcatcccagcgggtaatccgttcaaacacggcatggacggcggaaccaagcgcggcggctttccctgcgcccgcgtgtttttctccctggagcggggaggcttcctccgacaggccggaaggggatatccgttctctggccaacggtttttgcggaggccattccagcgcgtttttctccgcgcgtttttgtatgctttccgggaattcctcataccacccgtcaagaccgcgggagtacaggcatgacgctccggattccggaagtatgtcttccgttccccggttgaggggccggatagaggaacggactactttccacatggaatctgcctccgtttcttccttgtcttcccggtacgggaggataacgtaggtagcccgcttggcccgggtaagcgccacatacagcttgcaaaatccgtcgaattgctgccgggcgcgccattccccgtaaagttcccggaattgcgggatattcatatagacatgccgggagggggccaggacaatgccttccacaccgccctccccgttttttttgataaaatgggtcagatgccttccgtccgcaaaaggtgtatccctgccgatctggggcaggatgacgatgtcaaatcccagccctttggatttgtggatggtcatgatgcggacaattcccgcggcggggtcttcccggcgggtcaggtcttccatgcgcctgatccattcatccagggaaacgccctgttcgtccacctgttccgcctcattctgccagacggccaggcggtcgcggtggaagtccgtcagttccgcccctccccggagcaggcgctgttccagttcctccatgacggcggcgtaaccgtcccgttccagcaggaggcgccattccttccaccccatgctttccgggcctccctgcgtgatgaggggccggagaggggagtgggtgagcaggccgacgacaaaggggtctcccggcatcagcagccagcggaagaagtacagcaggttttttcccagcggagagtccacacctactggaacgtcgtcacatacttctgcggggatgccgtggtccgtcagccagcccttgatgacaagagcctggtttttcgtactgaccagtatcgctgtttccaggccgcggcgcagggcccctgtacgctccagaatatcggccgccacctggcataccaggtcgttgttggcggagacgttttccgccttgggtgcctgccagatttgggaggtgccgggacggtcttccagatggggggcgcaccggtgcgccggatattctctccactgttccagggcggcgggttcgcacccaggcgctgtccgggcatagtcgcaaatatcgttgaccaggtccagcacaggctggacagaacggtaggaagtggacatgccgcgttgttccagttgaagctgtgaagaaacggagcggaaaagctccgggtctccgccgcgccattggtacacgctctgcttgatgtcccccaccacgaaaatgctgccttcatttccagtcttggattccgccagatcatccagaaaaggcttgatgacgtgccattgggactgggacgtatcctggaattcatccagcatccaatggtcataacggcagtacatgcggtattgcaggtcccgtttgagttccggcgtcatggtgccccctcccagcatgcgcgtaacgtcgtggaacaggaatctccccctgttgcggaccagggaggaatatttgctctcaaacaggagcatcagcccgtgcgtggcgcgggtgcggcgcagcgtgtgcagggtctccatgcgaagccagctttggatgagttcttccagagcaggcgtccagaaatcccggaatttttcccgcgcctcttccacggtaatagcccaggcggaaccgccctctgtacggaatcgcacgcggcccagcctggcgtattgggaaaatccgttcaggaagcgcaggaacagttctttgttttttacgccgtttttcccttccggcgcaggagtttgctgaacctggaaaatcagggaatgaaggacggaatcaaattgttccagagagacgggaggcgccagctcctccggtgtgaagcccagcgtgacggggtttccccacatcccggcatccggcacatccagaaaaagttcgtgataggtacccaggcggcgcatcatggatttctccgcgtctgcggcttccgcgtcagaatccgccccggaaaggaaagcgtcttcaaaatccttccttcgctccctgtttacggagcattcccggtacagggagagcagggcttcacggcgcgccagtttctctgccgtggggtcaatcatactgaagccgctgactcccagctcaaaggtgctggcggaggcaatttgggcaaacaggctgtcaatggtgcagaggttgagtcgcgccaaattctgtaccaggatgtgcagtaaatggaggaagcgttcccgatgcaggttttcctccttccatgcctccggagcgccgggccagagaccgggctccccgtccgttcccttgataaccgcccagagccgttctttcagccgcgccgcgcctgcctcatccgtggcccctgcggccaggtctgtcagaatgcggtccttgaattctcccgccgcttttcgggtgaacgtaatggcgatgaggcgttcggggtggttgccgctgttcagcgccagcaaccccaggaaacgcagggagagctggtaggtttttcccgttccggcggaagcggagatcagcatgttggtcaggggcggcatcttaaaaaggaaggtggggggtgaggcggaggcccagcagatcctgcaggctttccctccgggaagtcatcaggtccttgaatacgtcataagagggcggtgtccagcccagttcctccgcagtgatgagaccgcgtccttcatgaagaagtttcatcagctccaccgtccaggaacaggcgctgtccagcgcgcattcctcatacccgggcatggtgtcgtggagggtgtcccaggaggagattccgatgtccatgggattggcgggaagggcgtaataagccgcagagggatggcccccgtaggtttccgaggcccacagcacataaacgggtagctgcaggtctttccagcgcgcgtgcgccagtttcccgtttttcaggcgtttggtgtagggatgcagggctggggaaagcaggggcagggcgtccggccgtccgagcgggtccagatgctttttttcacaggaggaggccgctcccgttttgtagtcaatgacccgtatgcgcccgtccgcatggcggtcaatgcggtcaatgcggaatttcatggggaagccgcccagtatccagttttctacctggtgctcaaaggcaatgcaggaccatccttcctgaagggcctgcaaatgctgagcggcgtaaacggaaagcctctgttccatggagcgtttttgcagcagcaggggcatgaggggggaggggccgtattgtttccggaaggtttgttccagtatttccgtgatagcgtcctgaaaggaggctgcgttcatgccgtctttcaggacggcgtgctcccggcagaaacattccagcacgtcgtgcagcatggtgcccagttcgttgacggccatgtcctctttgtccggcaggaattcttcctcattcatgtgcagcgcctcccgaatccagaagcgcatggggcaggccaggaaccttttgaggacggagggggaaaaggccagccctctttccttccacgggtttttgtaaccgggcgccatcgcgccgatgtcctcagcggtcttccagccttccgcgggttgaagatgccagtttccgcgctggtagggcaggggggcgggcacatcgctgatttcctggaaaagccgttctacgcggtgcggcagctccgcctccgggcagcgcatgagcagggaggaaggggtcagaggatcgttcctgctgctggtccgggagagaaggacggtgagactgccttcccgttcgcgggaatggagcagggcggtcagcagaaaactgtcccgggcttttttccggttaaaggaatcaatgcccagggtttcccgcagttcctccggcataaactggtcggaaacgcctccttccggtacggtcccttcgtttagtcccgtgagaatgaggtttctttccgggcggaagtgaacttccatccagcccagggaatccagtgccgcatgagcttttctcctgtttctgacgcgaagcggctggaggcatttcatcaggagcaggagagccgtctccgggctggaaaacgcggtggagcgctgttgcagacgcatgagtccggaaaggcaggaatggaacatttccatggcttccgtctccgggccatagatggctgccagggccgggaaccattccatcagccgttcccccagcattcccggttccgccatccggttccgccattccagaatggcctggatggaaggaaaggcgccgggataagcctctttcagcctggaaagcaggtattcttccgtttccggaaggaatttctgctggattttgtccagcgcggcgcagcaaccctgctggccttttattcccagggaggagcagagcagggaggagcgcgccagggaatagacggggcgcgccgtccccttttcttccagtgcccgccgaaggttgcggagcagatccatgacgccgcttccggcaaaaggcttcccttccggattgtggaggccccagccgtattggcgaagggctgcgtccagggcgacgttcatgtcaggatcgcaaacgcccagggcgatgtccggcgttcctccttccgctgtgcgggcgatgatgcggcacgtttcttcagccagccgcgccgggttggccgcaattctgatttgaccgtcgcggattgggatggggcgccgggaccactcttccggcagagggcatccccaggaatcaaaggaggcggcttcttcttccggcgcatgtatccatatctggacgggtacgccatttctttccgcatgctggagggcatggcgcagggggggcggcacctccgctgtgcaggccagaataatgtttccacctgtttccctcagggaattcagcagccggggcggggcttccgccttcatggcggtcctgtcttcaagcttccagctttccagttgttgcgtgcattgtccctccagcctttccatgtccttccagcgttcgtctctacccgcacaggcatggtgggccatgatgcaggagacgccctggttcgccatggcgtgcctcaggttttgcaggctgtaggccatttccagcatgctggaaaaatcctccggcatggtgcgtggaaacaggcggggataaaggcggtgaggcgttttccccagggccaggagccacccggccagttcttccggagcggacgccgtttcttccttttcttccatccggaggaactggtctgccggaatgacctggggagcgaagattgcctgtgtacgggaaatggaggcaaggtattccctcagctgccttccggattcccgtgtgggaaccagcaccagatgccgatggaagccatttcccagggaaagcaggcgttccgccacagcacggcaggccggtttgtcccaggatagaaagaatcggttcatggcagggaagcaggattccccggaaagggggaaagcggaaaattacctgggaatgctacatcaggatggcgggatttcccatctatttttttcattattgccgtggcggcgcatggcatgccgtgaggtgagccggcattggaccgcatgttgacggcgaagagaggaattattttgcctttccggcagggcgtggaggcggaaattcggaggaatggcatgtttattgttcctggacggcccgttttcccctggttccggtgaccagaagcacacctgtgaagaccaacaggacggagaggactttcatccatccgaagtggtccatgccccacatcaccgctacggatgatgcgatcaccggctggcagtaattgtacatgctgacggcggtgggtttcagcctctgctgggcgaaagacaggcagatatagctgacaaaagtagccagagccaccacataggcaatgcccagccatgtttgtacgggcagagcggaataatggatggaacccacttcccggaaggtgaaggggaggcaggcggctgcggcatacgtaaacatccatttcagcagggtgacgggagagtatcggccaatcaggttcttaaaaaaaacaaagtaaacggctacgctgcactgggaagccaggcagagaatgtcccccagcaggttgttgtctcccggtagggccgccgcatgcgcgccgctgccggaaaccagtaacatggctccgatggcgctggcgcagatcccgatgatttttttccccgtgaccatttcccggaggacgaacgccgccagaatcatggtcaataccggtgtaatggtggtgatgatggccgcatccgccggggaagtaaaccctacgcccaccgtgaaggccatctggttgaagatgattccgaacagggaggcgtaaaacaggggcagccgatgcttcctctctatgggttcccttggcacgaaagcggaggccagccagaacaggatggccgctcccagcaggcggaatgtggcgagagaagcggaacttacttctccctgctgcatgaccagtttactgacgggagacatgaggccccagatgacggccgccgctcccatcgcgatatgtcctttcagcgcttctgatggcatggtgcggcccgctgcgcggcgggtcgcacattctccgcttccgcaagcggattgcaagagtttttagtacgggaaggagcgtggaatacaggggaaacgtgtctatccggagcatttggaaggactcgttattctgactcctctttccccgtcgtttccggcttttctcctgaatggaaaataacaactccatattgtttccgtcgttaaagttcatttttgtttccttgcccaagccttgctgtggattggagaggaggtacaaaaataactcccccttgggttgatgcctgccctttttcggatatgtgttgatcgtggcgtttttgcccagtgctactgcggctggtcattattctgttcaacaggcatggaaatgccgattttatgttccctgctgttgccgcggagttccggggcgtacatggcctcaatgatggccggaagggcgctgaagcgtcccggacgttccgcgcgcaggcggtggctgatctgatattggcccatgggaagggaggaaaggaagaggcgtatttcttcatcccctatttccctgtagccgaagacggttcccagccgggcgtagccgctggcggtttcccgggattcgcagcctgcgggcttgggatccaggagcatgaggtattccacgtcgttcttcgttttcacggtcatcaccacttcaatgatgtcgccgctggcgatgacgtccccgtttttcaacagcgtgcgccgtgtcaggtctctgccctgggagacgagctctcctgcatccgtctgggtgtccttcacggagccgtttttcaccgtttccttccggatgcggtaataggagcgttccacggtgacggcattgccagcggcggggatggggttttccagggagaagtagctgagcgtggaattggcatagatgttcccgctgccttttttcctgcggatggtgatgacgtggctgccgtccgccagggctttcccgctcatgcggaaagcattgtcaaaggtgaacagggtttccttcgtgcaggaaaccgttttaaccggaatgccgtcataaaggatttccgcctccatgtcctccatgccttccctggtctggaggaggtaggcagacagggcttccaggcaatccgccgtatccttggtggagtcccagtaagaaccgttggcgcggttgtcgagcagccattttgccaggcgcgccgtgacgggattgccgggggcgctcttggacatcagtttcaggtaggccgcctgcgtggctgcgctgctgccgtaccagcgccaccagtatcctgcattgggaaggcgcagccaggcggtttgcagggaatcgtcctgctggaggaattgggagatgacaggcattaccttgttgaagtcgtccatgcggtgggcgtccagcaggatttccgccagttgaatctggctgatgacgggaagttccagcctgtcacggaacaggtagcgttccataggcaggtttttcacgccgcattccgccaggacggaatagaccagggtatccgtcgcggaggccgtcaggcggtaattccccagtttgcggagggcttccttcttttcaggtccgtccggcagttgttccagtttccggaatttgtctccttgttcaagaagagctgtctggcgttcctgatagtttttcagccagcggacagctccggaaagcatgccttccggcacgttgaccgtgtttgaagcaattttcaggccgtgagccacgtgggccgtcatgacgggatctccctcttccgcccctccgaaccatccccaggagccgttggagagctgtttttcccggagggaggagattcccctggcagccatctttttcagcgcggcttcatcataaacggggttgcgttccagttttttcatgacgctgtcatggaaggccttgttcctgatgtcccggggattcaggctgcgatggcttttcagcgccgctccgggattcaggccgagctgcttgagcgtgtccgtcacgacgagggcggggaggaagcggttgagcgtctgttccacgcagccataggggtattccgccagatagggcagggcctccaccatgctgagggcgatgctgggggagaccttgacgaccagttcgctttcctccctgcgccgctgctgcggcagggaaatggaaagtgtcttttcctgttctccggagagcactgcggcgctttccgcatggagctgcttcatgccgtgtaccagtacggggaagttcatctgcatggcgtctccggtagagccagccgatgcttccatggcgacggcggcggttccctccctgacggcggcagcccaccagttgacggctgcctgcccctgggcaggaacgtccacttcccgcacggcggaattatccgtatctgcggaaagccctttcacggccggatcgtcagccgggagaagttccaggcacccgtctttcagggaaatggaaacgcgggcgcggacagcctttcccgtccggttgcggaccagggcgctgagcatcacgatgtctttttccacaaagaagcgcggggcctgcatgctgaccatgaagtccttcgtggtcaggaattccgcggaagcctgcccaacctgcaatccgggggtgatgacccaggctgaggccttccatgtggtcaggttgtccggcatttccacgggtacggcaacgtttccttcttcatccgttttgagcgtgccgcaccacttgatgcagtccgcaaaattggtacgcagttgaatgtgcggggaaccgttttcctgcgcgtccgcatttccctgtccgtttgcaagggactcgctttctgcactttctttgtcctcggccatggccatgaccggaacggcggcgggggcggccgctcctgtagccaatgcgcggcttgcggcagcatcagcaccggaatcgaacactgcctccgcaaagccgttaacggtccctttggcctttcccgccataggtccgtaatttctgtagagcagggattggaaagagggctggcccggaccgcgatcctgctgcgtgccggaagccgtcatttttttcaggctgaggaagccggtttcgttcagtctgccccatacggttttggagatgtccgtaatattggggcgtgcgatgtattccagagccttgtcataaacggccagggcgacgatgccgttactgacgggtttgccgtccggccccttgacctgaatggtgacgttgccttgttcaccgggccggtattgggatttgcccggcactacggaaggagccagaagctgtccggcgggcggaatcagaagttcggcggaagcctcatgaagttctccgtttctgacggtgaaggcgttgactcccatattgggcatatcttcccgggtcaggcggcattccacaagggctgtctgccggtccagggaaaccagacggcgggattcgtttttccaggagttgcgcaggaaggtccagacgcgggcgtccggataatcagaggtgacgagcagcctggccgtatctcccggagcgtattcctttttgtccggatggatggaaagaggattgattttaaaaggattctgtttgcccttgccgtaggaaaggaactggaaggattcttccaccttgttgccgtgcccgtcctccagggttgtggaaagggcatacaggccggattccccggtctggaaggacaaggaggcttccccatctttcccggtggcgatatcccaggtttccagcgtttcccgtctgccgtccgcatggatatgctgcaggacgcaggttcccctggcatgggcaattttggcgccatccgccgtggctgcggtaatggatgcccggaccggcgttccggcgggggcatagccgcggttcagggtgatgaagatattaaacggacggaaagtggcaatgacttgtccggaagcggaaacttcccgcagggaggcgtccgtcacgctgacggaaacgcggtaggtgacgttgctggaggggaaatcccgggcatcctgcgccgtgggtaattctacggatgcttttccgtccttgtccagcggcaccgtcttttccaggacggtcagaggcgcatccgggaaaaagggaatgtagtacgggctgaaagacctgtcgtacagccagctccatttccagtaaggcgtccagatgttcgcccccagcgtccgggtgatggtgatggttgcctttcccccgcttacggggccgcccgcgtaataatccgcctgaatggcgacgggaatgggttgtcccagccggataggtttggcgggggcatccattctgacggagaattccggctttttatactcttccatccggaaaaggggggcatacagccggaaatctggatctgcggagtcatgcagtttcagcttggccccatactggcccagcggggcgtccgcgggaatgagcagctccagttcaaagctgcctgtggaatccgtcgtgacggtctttggagggaaaatgctctcatcccctgttggagaggcaatggtcagcgtcagtttttttccggcgcagtcttttgtttcgggattcgcgatgtccgggcggaagaggacgcctttgaaacgggccgtctgtccggggcggtacacgggctggctttccaggaaaaagcaggaataggagtcggaggccttgttggccgtatccatgaggtaattgccggattcccagccgtagtcagatattcccgccagcacataactgtcccccttggaagcgatgcccaggaacatgttgtagggaggggtgctggaatggcggtgagggattgtttctgtcatggctccgtccttgtccgtgattccctttacctggcgtttttggagcgttttatcctgccgatagcggaggagccgcaggctgcctccttccacgggcattcccgttctggcgtccgccaggaaccagagattgccttccggaacggaacggcgtaccagcaccatgtctgacagagtaagaaagcgatggaaccggtagccgttttccagtgtgacggtgagcaggtaccagccgggtttgcgggtgggtacgggaatgtgagcgatgtggttcaggtaccggttcccgggagtcagggttatctcatcccccttgatttcctcccccagatagcgggcataggatgagtcatgcaacaggctgaagagcaggttccccaggttggaatacctgtctttgtaagcttttcccagcgttttggaggtttggaccttgtccatgcgttcttcctgccaccgtttcatatccacggggcggaccgctacgcaggcccgggaagcgttgcggtaggagaaggaaacagtcaccggttctcccgccagcagcgttcttttatccgtatcaaatgttccgttgggttccgtgatggaggcgatgcgtttcttcagattgtccgccacgtccagaaattcctccttgtcctttttgttccaggattgtgcgttccaggtttgaaggatttttcctaaaaactgagcggcagcgggcctttggttgcgggccaggaattcgtccgctgccagattggcggcgttaacgtagtaatccggctccggcgttattcggacggcggaagcaatccggatgaagtcataatccgggggaaggttggtgagcaggaatttaccgttgcccgtccggtcggttttaacgatggtctggtccgtttttaattccgccgggttgatgcccgccaccatgcccgcgttgccggggccgtacacgaattcttggtccggcgccgtattggcataagagaacagccggcggcaccaggaggcggtgaaataattgacctggttggccagttccggattcacctgaatggcggcgtccagcagccagcgcatgcgttccccgtcgtttttagctgtttcccaggaggaagaggcatggtaaaagataacttccggctttcctgttctggcattgaccatgacgggaacggtggcgacgtttcgaaaaggggatacttcctctctggagacgtaatccggcaattccttcaggttggtcaggttccccagggctgcgtaagactggaaggcggaaaggggagcgtagcggtttcctttgaccggcaacgcctgtgccgtgatgaagcgcagttgtcccagaagtttcatgttgttgcccttctccgcaagctgcatggctttgacaaggcaccgcagggcttccacacggtcccttgcttctccggaatattctccatcccatggcccggcgccgcggatataggcgccgtccaccagtttgaacgtatggcaggcactctggtacaggagtgcggcgtccctcaggaaatggggattggcgccgtggagcttcatctgttcctgcagaatggaatccaaattgatggaatcatccagggcattgagacgggtaagagcctggtagtaaagaagcagatctgccccgctgtattggtcgtcatattcatggagttgtttcagggcctgttccgccgctttcttgaacagccttttgcccagaagcttttcaaggttttcaacagcttgcttcctttgctgcggggaaacaggggaatttttaccctccgcaagggcatgttgttgcggaggggtggatgcgtccgccggggacggcattccggaggccagcaatcctgccgccagaaaaagagcggaaaagaatctgttcattccgccagactacttccaagtaaaatctttggcaagttgcaagtaggctgcgggaaaagggagattgtcttaacgctgtcaacaaggccgggagtgagggaaggggtattccatgatcagacgtttttcccctttcgtcatgcgtgctgcagattactgcaacccagtcggtagatggcctggatgtcccggacatccagcttttccagtccgccgacggggccgcgcacactgacggcctgttccgccatcagggggaaatccccgggaaggatgttcagttcttccatagtcgtcggaagccctaattcccggtaaaaacgttccagacgggaaataccttcccggatgatggctgacggttcccggaaggaaccttccactcccatcacattgacggcgaactgcacgaatatttcctggtgtttgggggaaacatacttcatccaggccggggtgacgacggccaggcctgcgccgtggtccacatggtacagtgcgctcaattcgtgttccatggcgtggcagccccagtcctgttcgcggcctacccccaacaggttgttgtgggcgatgttgccggaaaatgcgatttccgcccaggcgttgtaatcattcaggttcccgttcaggatgcgggcgtttttcatgatggtgcgcagggtggcctcacaaaggctgtcggaaaggtccgtatgcagggttctggtgaaatagcgctcaaaaatgtggctcatcatgtcgctgacgccattggccatctggcggtgcgggagcgtaaaaaacaattccgggttgataatgctgaatacggggcgcagtttgggggaaccgtaccccagttttcttctggtctcttcattggtgatgaccgtattcgggctactctcgctgcccgcggcgggaatggtcagcacggttgcgacgggcagagggtcggactgaggctgttttttggaaaggtatagttcccatacgtccccttcatggggaacgcccagcgcaatcgctttggcggagtcaatcacgctgcctcctcccacggccagcacgaggcccaggccgtgttcccggcagaggcggatgccttcatacaccaggggtagcgtagggtttgcctggacgcctcccagttcttcatactccacgccgatggtttttaaggacgccgtgacggcatcgtaaagaccggaacgtctgatgctgccgctaccgtaatgaagcaggatttttttgcctaacggcttgagaagggttcccgtttcatggtgggtgccttttccgaaaataagagtggttttgttatcgtaaacgaagttgagcatgacgggaatgatacggcaacgctacggcccttccgcctccttctcaagatttttgtatggcctgttcccctttccagggggggatgctgttccggaggatattctctcatgcaggggttctgttcttctctgttttttcatcattggctcatctggacggagctttctggaggattgttttctttccgttgttttttggcgataagattcagcggaaatgactccctgcgggagtggcggagccttccggccccgaggggccaatggaagacggttatttcattattctgggccgcttccggcaggtaatcggaacaatggccgtattcggccagggatgcgcggagaaaggcggggaaacgggaagttgcagaaatccgtaaaaattatcctggtgaatactgttcaaaatcacgatgcatggcatactcatcctgctttttgcttgagcgcggaggctttcccgtttattgtcatgcacgggccatgttcggtccccgtagttcaatggatagaacgggtctctcctaaagactagatgcaggttcgattcctgccggggacgccacccaatattattcagggccttgcatcagcattaaaaacgcagggattttgcctctcttgcgcgaggtatcgtcatgattgattgaatggggaatgattcaagggaaaagcaggtatccggattatcggcgttcggccggagagggcgaataacttgggattcatgtccgattggaaacaaaaagcaaatgcggaagaaagattgcagacggcaaggaaatgtgctaaaggctgccggagaagagcctttggggcggaacattgtgcttcgggacatgaacaggcaggcatggagcaatgtttcccggccgtacaggggatggatgaaagagcgttatgcaataacaaggacaagaagatggaggcaattaaaataatccgttatctgtcgcccgttggagaaatgatgattggctcatatggcggcaatctttgcatttgcgactgggcaaaggaaaaacgccgcggcacgatagaccgccgcatttgccagcatctcaacgctgaatatgaagaaggaacttccgaggttattgaacaggcggtaagccagctccgtgaatatttccagggggaacgcagagactttgatatacccattgtatttaccggatcggaatttcaaaactcagtctggcatgaactgatgaaagttccttacggttccaccatttcttatgcagagctggcgcgccgcattcatcatccgagggctgtccgggctgtagcgtccgctaatgccaccaaccccatctccattttcgtgccctgccaccgcgtcattggcagcaatcagaaactgacaggttatggcggggggcttgatgcgaaacgggaattgcttgccctggaggcgcgggtaagcggaagtgtgctggccttatgacccgtgaggtgaggaagacaggcaaggacgtgtcaggtaaggctgttttgggaggctgctcttccggggcagcccggcagggggggcgttaagaagcttccgcggttgcggctgaatttccggctgtcttcgtttgaatggaggtgccttgtgaggagcttcaccatttgaggagggtatttcctccctgggcgaatccggagagcagggtgcccattgctgaggttttctgggctctcgcattggcgcggcccatgtattgctccatgttggcgtggttgtacagggattgggcgttcctcatggcttccgccgcttcatcctgaatccgggtttgcaggcgcgttgccagagcctgttctctgattggaacggagccttcccggagtagggaggattgggcggcgtccagtcgggcttctcccatttggcgcgcagcgtcctgctgcatgcgtttggcattttccatccctgtctgtttttggaggtctgcctcgttcctgagggtggcggcatttgcgtccgccgcctgtctggtggcttccgcgctttttttctgtgcagacgcggatgccgcacctgctgccgctgaagtagcggccagtgttatcattcccaatgatgctggatcaaatcccatgcgcgcattctgatatgaaaaacggttcaggcgcaaaacgcctgaaccgtttgacatgaatcagggtttggcacagaaggggttactcaatcacgatgctttcaatgttcagcaccggatgttccggagtggagtggggatcaatggttccggtaatgatgacggcgtcttgttctttcagcccgttcacacctttggcggagtgcttgatgggctgcccttgttcatccacgaactggacggtcatcgtgttatttttccgtatttccaccggtaccgtaccggcggcccagactcccttctccttcatattgactaggagctgagccgggtctccgatggtgaaggaagcaatgttttttgaaaagacggggtcatctccgattaccgctcccttgacggtgactttgtcgcccggagccgcttttctggcatctgaaacgaccagagcgcgtggcaggccaaccatattttccgcgaatcttacggccatcttctgggtaacgttctggtcggaagtgagggcgtttacagtttccttgggattgcagcccatcagggaaactgcggccattgtcagaatgatcaagtgtgtggtgcgcatggaaactcctttctgttgaaaggttggattccttttccccttctgccgttcatcattccgtgtaaggaaaagaatattttttacaggaacagcccggcagccagcatggcgaggtccctgagaacgtcccacaatttttccgcattgtggatgcaatccgccagaaagcggtgaaggcttacggcgttgaacaggcgcaggagcgccaggaagagaagaagattggcaaaatatacgagaatcagggagaagaaggtgccgttgtccgccaggtccggctggtccttgggaatgatccatgccgtccagaacaggtggaagcaccaccagaagcccaggccggagtaaagaagggcttggcaggtgactgtaggccagaagaggtacgttacgccccataccaatccccacagcatggcccagagaggaaggaagtagggggaaagggagataaagatgttgtttttatccgtctggatgtaacctccgtccagatccgctttgaaagcatggatggagccgcggctgcaaatgaccgccagagcgtgcgtcagttcatgccccaatacgtacaggtacagcagggaggatgtgaacagcctgctgctgcccagcaccacccacacggcagcgcccatcagggcgtaccatacgggaatggagaagaggatattgaggctgccggaggcatgggccagctggtcgcacagggacatggccgtgatcagggccagcggaagcaggataagggtggctacggcatgcctgatgaaccgggttctgcgcgggagatccatgaaggaaaattcctggcattcgtcctcccagtattcggaggatacctgggcgcggtaagttttgtcccaggcgtcccggttgcattgccgcatcatgtcgccgaggcttgccgcggatcttggtttccgggcggtttctgcataccggcgccagtcctggcgcggcggtgtgtgtctgggggccttgggcatgcggtgtgaggtctggaaccagcataaagggacttgaggagaaatgcgaaccaaatttgcctcttccggaaaccggaggaaaaaatgttttatccacgccggctgttcctgtataatccgccgcatgcaagatgtcctgctggttctggaaacttcctgtgtgcagtcttccgttgcggcttggagcggggaaagtctgctgtgccaggcggcatggagagcggagcgcaaccattcctccgctattttcaaggcggtgcggcaggttctggatgctttggaagggcggcgtttgaaggaaatcgtggtaggttccggtccgggcgcttacggcggaatccgcgtagcgctggccgtggcggacggactttccctggtgcacggttcccgcgtggcggctttttcctcctggaacggacttggtctgcatcatggtgaggcctgcgtaatgtcagatgcccggcgtggcggctggacgtgggggaggctggaaaacggcgttctgacggatgtgctggcagtgcttcctgcggagcaggcccgcgtcagcgtggcggagtgcatgggaaaaggcgtgcccgttttttccacggaaacggcggatcatctggccgcccgggaaatgtcggggattgtccccgtgtatccttctgcagaggcgctcggggccgtgtggctgtccctggcggaggcccgcagagaagaacttctggaaagtccggcggaaccgctgtatgtgagggctccgcacatcacccgcgccaaacgtcccgcatgggccgtgaaggcgtaattaaggtttgactttttggaagattgttagacttttaaccggtaatattcaccaccagtagcattttttaacatgagcaatgacactttttccgagcgcctcgcatatcccaaaggtttaaaaggaatcatcgccaatgaatccgctttgagtgacgtgcgcggcgaggaagggcgtctgttgtatctgggctacgatatcgatgatctggtggagatgtgctgttttgaagaagtggtttatctgcttctcaacaagcgtcttcccaaccgtgaggaattggagggcatcaagaaacgcctccgttccgaccgcgacctgccccagcccattctggatttcttcaaaacggccaccaagtccgcccggcccatgtccgccctccggacggctgtttccatgctcggcatgtatgacgaccggacgaaggacgccgggcagttgaaggaaataggcctcagcctcatagccaaggttcccgtgatggtggcgtattactaccgtttgtgccagggtctggagcttccccccgttcgggaggacctgagcgaggcggaacatttcctgtggttgttgaagggtgaggaaccggatcagtatgaagcccatattctggaggtagcctacattctgcacgcagaccacggcatgaatgcctccacctttgcggcgcgcgtctgcatcgccacgctttcggacatgtattccgccatcaccgcggccatcggcacgctgaaggggccgcttcatgggggcgccaatgagggcgtgattgaaatgctcaaggaaataggcacggaggaccgggtggactcctacattgaggacaagctggcgcggaaggaaaaaatcatgggcatgggccaccgcgtgtaccgcgtgctggatccccgcgccccgcatttgcgacgcatggccatccgcctttcctcccgaatcggtgaacccaagtggatccgtatgtcggaacgcatcgcgaaacttgtccgggagcgcaagggcttgaatgccaatgtggatttttattccgccacggtttattacagcatcgggatccccaccaggctgtttaccgccattttctccattgcccgctgtagcggctgggtggcccaggttctggaacaaatggaggataacacgctgtacaggccgctgactctttacacaggacccaaggaccgcattccggttcctacgatcgacatgcggtgacaggttttaatcaggaaaggcgccggaaacaatatccggcgcctttcctgcatctgccttccgcttttttttcgtgaaaatatcctttctatccgcaagcggtattcaaccgtactgttcattgtcctgggctttttccattatagccgtagcggaagctcaagaaattattgaatagcaatatgccgttatcgcgggtggggatgaagcagatgattttttcagttccctaggagactatacgggattcccataagggtatgttctgggatatctgcggagccgtctcttccttgattctatcttatctggtatgtccctgacggaggaaagacgcggaacccgcctcttcatggccctgtgttctttggtggtggaacccgcagaacatccatgccgatgtggagaggcaggcggggggggcgtcaaatgccggtctggcgcagtccttcataaaggacgacagctacggctgtggatagattcaggctgcgggctccttctccgggcatcggaatagtcagggcggtatctgcgtgttctctcagcatgctttccggcaatccgcgggattccggtccaaaaaccagatagtcccctgcgtggaaaaccgcatcccaatgggaacgtggcgccttggtgctcaggtaccagaactgcgcgccgggggctgccgcctgcttcaattcctccaggctgtcccagacatgcaggtccaccttggcccaatagtccagacccgtacggcgcacatgcttttcatccagactgaaccccaaaggtttgatcaaatggagcctggagcccgttgccagcgccaaccgtccggcagctcctgtattatgcggaatttccggatggaacatgacgatgtggaaacggggctgcatgcgcttattctcatcacaaacaggcctcccgttcaagtgggacttgtccaaaagtggcaaataatgtacgttttcacccgatgagagacatcgtatattttgatttggaaacccgtcattccgcggcggaggtgggcggctggcataatacggccgagatgcgcctttccgtgggcgtgacttattccacggcttccggcaaatatacgatttattctgaggaaatggtggatgatctcatccggcagctttcccaggccgacctggtggtgggttacaaccacgagcatttcgactatggcgtgctccagcgttatacgatgtggaatatgattgatatcacgaacaaccttgatttgtgcaaggacatcgaacagcgtgggggagtgcgcgtcaagctggattccgtggcggccgcctccatcggttcttcaaaaacggccgtgggcacccaggctctcaaatggtgggcggaatatgcgcagacgggtaatacggagcttttaatggatatagcccgttattgctgttttgacgtgaaggtgacgcgggatgtgcactggtacggggcggaacacggtttcatccgttatgatgataaaaagggcggccaggtggaattgcccgtggattggaaattgtaacttttcctgcatgcatgcccggccagctgtagccggtttttttccgggcgctgaagtgggtctggtttcccgcctttggcggcgttgccgtttatccccggacagatgccggttatcagggaatggctggggcggagaaaggcttccgggaggaagcggacggcaaccatgctgttgccgcctggcttaacggcggttgatgcgggccacttcccgctgggcttcgcgcatttccacgcgggctttcaaatcgtagcgctggtcgcggtgggttttgcccttgcccaggcctagagccagtttcaccttgccgtttttccaatacagcttgagagctaccagggagcagcctttctgggaggtctgctgttccagtttaaaaatttcccgtttatggagaagaaggcggcggggctggcgcgcctggtgctggaagaattctcccgctgtctcccagggctggatgtcgcagccgtacaggagcatctggccgttttccaccctggcgaaggaatcggcaatattcaccttgcaggcgcggatggatttgacttccgttcccttgagttccatgccgcattcgtaggtgtccagaatttcgtaatcccggcgggcttttttgttggtggaaatgtcggagctcatggcacgaaggggagaaggatgaaaaggccccgggctgggagaccggggcctggctggatagagaggattccgtacggaattccggtccggaacggcaataaagggaatgtgttgttactggttgtcttcctggaggctgccggattccgtatgatagacgagcttgccttcaatgatttccgtcagggcaatgttcgcgttgcccatatggggtgtggtaggcaccagcggggcgcggccattattaagctgggctacgcggcgggaaaccacgttgatcagcatttggggctcgggaatgattttggaggcttgttcgacgagttcggctttcatgtaaaaaggtctaggtagatatcctgatgcggagagagatataaaaacggttcctgtccggaatcaagcttatattacggcatgagctgccttcgctcgcgggaatccagttctttccatgcgccgggtttcagtcccgccagggagaaatttccgattctggcgcgaagaagccggagtgtgggaaaaccgatggcggcggtcatacgccgcacctggcggtttttcccttccaccagcgtcaattccagccatgaggtgggaatggaggcgcggtagcggacgggagggatgcggggcggcacgtcaggctccctgcgcatgaggcgtgcccggcaaggcagcgtgcagtgcccgcggatgcggaggcccccgagttccagagggcgaaggtccgtttcggaaggagtgccttccacctggctccaataagttctgggatgcctgccggaggggttcaggagacggtccgccaggcccttctcatcggataaaagaagcagcccttccgaatccgcatccagccttcctacaggatacacgccgggaggaaacccgaattcagccagtgtccggtggtggggagcctccttcgtaaattgggagagaataccgtaaggtttattgaacgccagaatcatgccgtgcacggcaagggtagcatgaaccgctggctttggcacgggaaattgaagcggcttgacttgtctgtgttggggaaggaaagtatctgcatgcatggaaaaacggcaggttgtgtcctgatgcttgcgtgttgcgtgcccgtctgggttcaggcggcgccggatacgggggaagtgaaggcaaaaattgcgcggaaaatctggcaaaacgaatgtgccgggacaataagggggctggtttcctggaaccggggagaggcgtttccatccctgggaatcggacatttcatctggtttcctgccggagtcacggaaaggtttgaggaaagtttccctgctttcattcaattctgccgcaggaagggaatccgggttccggaatggttttccggagcggctccgtggcggaccagaaaggaatttgaaacggcggacgttcgcggcggtcttcctgaacggatgcgccggtggttgtccagcccggcggccctgcaaatgcaggcggatttcattattgccaggtctgtggccgctctggagcgtatcaagggccagtcccgccgtccggaagagatggcggcccgctattacgccgtggcgtcggttcccaacggcatgtatgccctgattgactacgtgaatttcaagggagaaggaaccaatccggcggaacagtaccgggggattggctgggggctcaggcaggtgctggaggaaatgcgccccgtttctcccggacagcctgcggcggttgaatttgcggaagcggccaaaagggtgcttcagcgccgcgtggacaacagcccgccgggccgcggagaagcgcgctggcttgccggatggcggaaccggtgcgattcctataagaggaatttgtgacgaattcctttcccaacagaaaagaccagttgtgcaattatccttgacctgacggggattagggtgtaattccctcactccatcctgaaacttcgctgattttatgccaaacactcaagaagaaacaacgctgattttgctgaagcccgactgtgtgcggaaaaacctttccggcaccattttgaaacgttttttgtccgaagggtttcgcctgcgcggcataaagatgatccagcttgacgaaccggtgctccgggaacattacgcccatattctggatctggtcatcaatggggaaccgcttttcccgaagctgcttgatttcatgaccagttctccggtcatcgccattgccctgaaagggcccggcgttattgtgcgcgtgcgcgaactgctggggcccaccaattcccagaaggcgcagaagggcactatccgcggcgatttcggaacagacagcatgatgaacatctgtcatgcgtccgacagccgtgaatccgccgccgtggagctggcaagatttttccgggaagaagaactgtttgacggccttaattaagggaaggccgccttttcccatcaggtttcattgagggccgcagctgtaataacggctgcggcccttgccgtatcggggctgtgccttccttgggaggatgaagggggaaggcagcggcttttctgggagaagcaggaaagaacgggttacttttcccagggagtggtaagataaaggaaggcctttttcatacggtaggcctcacgcatgaagccgtccatgatattgttgcagctgtgcttggaaaaggaaaggccgtaaatgcgcttgatggcggcatcctctccgtgctgcttctggcgctttagctcagcgtccatgtcccggcattcgatattgggggcgctcagattgtcgccatgccagcgaaaatccgccagcagcctgttgtaatgcacgaacttcttccccgcccggccaaggcgcgcgtaatattccccgtccatgtcgtagtggaagcgttcgtccagcaggaacccctcttcaatagtagtgctccggcgcaggaacaatgcggtggaagccagataggtgccgtaccagatgtgcatgttcagactgtagggcagggccttcatggcgcgttggatctctccgtccggcccgatgaaattccatgctccatacacaatgtccgcatccgggcgggaatccgcaaaggccttgaccgccgccagagcccccggcagcaaccggtcgtccgtattcagccacataacccatttcccgcgcgccttgcggaagccgcggttaatgccttccgacatgccggaatccttctctatatatagtttcaggtgagggtaggagtgcaggatatccagggtgccgtccgtggatcctgcgtcctggataatgtgttcaaatgtaaccccttcctggtttttgacgctctctatgcattcccttacgtagcgggcgtaattatagctgggcgtaataatgctgaaatccggttctgtgtccataggcaaggttagttgaaaggcttgatggaacgttccctggcgatgtaaatagggcgctttttaacttccgtataggttttggccagatattggcccaaaatgcccaagcacagcagcacgatgccgcccatcatgcagaagacgcataccagggaagtccatccgtaagcagaatggggccagatcaattcgcggaccgtcaagataatgatggaaaggaatgagatgaaggaaagaagtacccccatgatggaagccagcgccaggggggcggtggaaaaggccacgataccttcaatggagtacaggaacagcttgaagaaagaccacttggtttctcctgccacccgttccacattttcatattcaaaccatttggtccggaaccccacccattcgtacagccctttggaaaatcggttgtactccttcagggaaagcagggcttccagtacgggccgagtcatcagcttgtagtcccgggctccgtccacgatgcgggtgttcgatatctgatgaatcgtcttataaaaggcgcgggcgaaaaaggaccgcagcagcggttccccctgccgggtgacgcggcgtgtccccgcacagtcatatccttccttctcaatggctttcagcatatccggaagcagggaaggaggatcctgaaggtccacatccataacggcggcataatcccctgtggccgcttccaggcccgcatagatggcggcttctttcccgaaattgcgggagaaggaaatgaattttacttcaggggagtgttccgccattttcttaatcatttccagggagcggtctgtggaaccgtcgtccacgaagataagttccggggcgtagccctccaggcattccttgaaaacccggtctatttcttgcttgaacgccggaatggcttcttcttcattcaggcagggaacgatcagggaaatacgtttcatgtcagtgcccgaatcatacttcagaagccgtgcggatgccagaaaatatgcacaaagccttcctccgccggaaggggaggaaggctgccggaaaagaagccgtgcgcggaaaaataccggtaaggtcagaacttcggcaggttgccgatgtcatcttcgttttcaggggcgtgcgggtctttcaaatcactgtccccgtcttttccgaaagaccagaaatcataatccggattcaggccgttgcccattttcaggtttctggccctgtcggttctggtggggatggattgctcgctgcccaggcggtagcggtagggggaaccccatggatccgcaagaatataaagggtaaccggcctaccgtccttgcttttcacatggacttcccggacagtcgggttgcttttgggctgtgtagaggggttcaactcatcattgtaaatggttgtatccctggaaggaacaccctcattcttatggtcgccgaacagagccatgtaaaccacgttggaactgtattcctccccgttggccacggctacgccgtgattgttgaagggagcttccgtgccgtaggggtagcggtcatggtcgctgtggtagctctccagccccatttcaattttgcggacaatggattccgtagcctgttcgttctttctggtttcaagccaggtgtaaatggagatggtcagcgtggccagcaccacgatgatcaccatcactaccaggatttccatgagggtgaatccctttgcctcccggagtaagcggtatgcggagtgatttttcatctgattctgcttgaggggttatcccatcttttcaataacctgcaggaggggaaggaacatggcgaacacgatgccgcccacgaccacggccaggaatacgatcatgatgggttccagcatggaggtcatagctcccacggcattgtccacttcatcatcatacacgtccgcgattttcaggagcatgtccggcagctggccggtttcttcccccacgtccaccatggagattaccatgggcgggaaaagcttggaggaggacatgggcgtaactacggattcgccttccttgacggaatcatggatgaggccgatggcgtctcccacgatcatgttgccggcggtatccttcgtgatggtaagcgcctggaggatggggacgccggaagtcaccagcgtaccgaaggtccgggcgaagcgggcgatagcgcttttgctctgcacattgccgatgaccggcatggtcagcagagcggagtcaatcttgcggcgtccgttgggcgtcttgctcatggccgtgaaaacagcgtacaggatagcgaccaccgcggccagaatgacggcattgggcacaaagaagggggcggccatgaaccagtcgctgatgccgaacacaaactcggaaataccgggaagctcctggttttgttctgcgaacatcgccttgaatttgggcacgatgaccagcatcaggaagatcacgatgcctacggcgataaacaggacgatggagggatacaccatggcggagatcaccttgcttttcagcttttgggccttttcctggtattccgccagacggttcagcacgacttccagcacaccgcccagttccccggcctttaccatgttgacaaacagtcggtcaaagattctggggtgttgggccagggcttccgagaaggtggagccgccctgaacggaatctcccagagcttcgatagtgacgcgcaggttggggtttgcctcctgtttggccagcacgttcaaactctggagcaggggaagccccgcgtcaatcagcgtagcaagctggcgggtgaaaatcatcagagccttggccttgattttgcctcccagcttgcctttttgcttcttggctcccttggcctttttcttggcggcaggcgtctgctgaatcttgcccttgcccgcttctacgatctgggtggggtacaggccatgcgcccggatggattccatggcctccgcttcggaattggcctccagggtacctgttttctggtcgcctttatggtcaagtgctgtgtattgatatttaggcatatatgttgtattttaagtgttttttcttagtggttgaaataaggggaagcaacggcgtccggctgtccgttaagtatatttcagcacttcttcaatggtggtgttgccgtcataaatatttctcagcccgtcttcccgcagcgtggacatgcccatttcaatggctttctgcttcagcaccacggaaggagcgcggtccgtaatcatgtcgcgcagggtatcgttaatatccaggagctcataaatccccttgcggcccctgtagccggaattggagcatttatcacagcctcggcccgtgaaaaagtgcttgtctcccagttcatagggagagacgccaagctgggagaggatggtggatgagggttcatacggcgtgcggcagtccggacagatggtgcgcaccaggcgctgtgcaagcaccccttccagggaagccgccaccaggaaaggttcgcatcccatgtccaccagtcgcgtaatggctccggcggagtcgttcgtgtgcagggtggagagaaccaggtgacccgtcagggatgcctggatggcgatctgcgctgttgccatgtctcgcatttcccccaccagaatacggtccgggtcctgtcgcaggaaggcgcggagcaccattgggaagtccaggccgatggcttcattgataggaatctggatgatgccgtcaatatcgtattcaacagggtcttccgccgtcagcaccttggaatcaatggtattgatttcacgcagggcggcatacagcgtagttgtcttgcaggcgccggtggggccggtaacgatgaaaatgccgttgggcttgtggaccgtatccagaatatattcgtggatatgcgcgggaagccccaggttgtccatgttcaagttgacggaagagcggtccagaacgcggagcaccacggattctccgtactgagtgggaagggaggaaacgcgcatgtccacggaacggtttcctatctgcttgacgatgcgtccgtcctgcggaatgcggcgttccgcgatgttcatgttcgccatgactttgacgcgggaaatgaccggcacggacaggtggacggggggaggctgcatttcatacagggcgccgtccacacggtagcggattttgaattccttctcaaaaggttcgaagtgaatgtcggaggccttttccttgatggcctgcgtaatgacgaggtccacaaagcggatgacgggagcggcggcggagtcctccgtctcattgttgacctgcatgttgttcagctcctgcatcaggtcggacatggcggcggattcgcctccataaagctcattgatgcgttcggaaatctggtaatccggcgctaccagaacatggatgtcctggccgagggcgaagcgcaggtcttccaccgtctggggattcaggggatccaccaggcagacgtacaggccttccggaccatgccgcacagggagcgccccgtgcaggcgcacgagcgtggccggcatcatgttctgcacgttcgggtccggctggaagttgtccagtgtaatgaattccgtacccaggtcgctggcaatcatctgccagatatcatccttgctgccgatgatgccgaagtctgcaagcacttccggcagttccttgccggaggcgatcatttcctccttgatgtcctttgccagggatttgtcaatcattccccggccgatgaaaagttccagtgtgaggttggtgtccataataagcagaatgaatagcggggaaaaatcagttggcgtctcccatggtgacgttcagcacttcttccggagaagtaaggccggccagcactttgcgtacgccgtcttccctcaaggttctcatgcccagttcccgggcgcgctggcgcagctggggggaagtcagattttcgttaatcatgcggcgcacctcgtcgtcgatttcgaaaatctcaaacagccccatccggcccttgaatccgccgccgcggcaaaagtcgcagccgtggggcgccttgatttggccctgggcaaggcgggacatgtcaatgttcagcgtatgcgcctgcttttccgtcagagtgccgtccaccttgcagcggtcgcacagcttgcggacaagacgctgggccatgatggcgcggacggaggaggcgatcaggaagcgtttgatgccgatgtccgccagacgagccacggcgctgggagcgtcattggtgtgaagggtggagaatacgaggtgccccgtcagggaggcgttgatggcgatgctggctgtttccatgtctcgaatttccccgatcatgatgatgttgggagcctggcggagcatggcgcgcagggcggcggcgaaggtcatgccgatatccgcctttaccattacctggttgatgccggagagttcgtattccacagggtcttccaccgtgatgatttttttatccgggcggttgatgtggttcaggcacgcgtaaagggtcgtggttttaccggaaccggtaggacccgtcaccaggataatgccgtccggcagcgtgatgaggcggtcgaacacagcttcatcatccgagaaaaatccgagctggggaaggcccagcaccagggcggatttgtccaggatacgcatgacgatgctttccccgtggttgctggggacggatgaaacacggaggtcgatttgcttgccgccgatgctcatctggattcgcccgtcctggggcatgcgtttttccgcaatgctcatggtggtactcattaccttgaggcgagcgatgatggggctgagcagttttttgggatgcgtggccacttccaccagcttgccgtccacgcggtagcggatgcggagcctgttttccatgggctcaatgtggatgtcggaagccctcattttgaaagcgtccgtcagcatctgctgcaccagccggataatgggagcatcctccccttccagcccgtcggtttcttccggaacgctaagatcccggtaaaattcattcaaccggctttctatcgcgctgtgggtggcgacgctgaaaatcacatcccgccccatcagctggggcaggctgtccatggtttccagattcagggggtcgtcaatagcaatgttgatggaaaaaccgtcgtcggaaatggggatggcccggaagcgcctggcaagttccggcgtaatgagttcgcgcacctcctgggggatgtgcatggagcccaggtccacgacggggagcagggagtttgacgccgccacctgagcgatgacgtcttccgtaagataattggcctgaatcagaaaatcgaccaggtcctgggtgggagatttttgactgcgcgcgtactgaagaatttcttcattcagatatccggcctgcgtaagaagttcgatgagatatgattcgttggagtacacgtcgatctctggatgctattgttggaagtctgccgaaatggagcggcaggatactcccctatttctgacaggttcggaacgtaaagtcaacttagcttccctcaaaatggcattttttttcgggcgtgtccggaggcgggaagaacctccttccctctccgccgcttttcaaaccctgcggaatcttccggaaagcgggattttccctgtactcagggcttctggcgggggagcttggaaagcaggtcttccagctccggcatgctggatacccgcaccaggcgggaacgcatttccttggcgccgggaaatcccttcgtataagccaggattcgtgacctcatatggcgcatggtgtgaagttcgtccccataatggcgggattccagggccatccgggcatgccgcaaaatcagggccgccttttcctgcgggtctctggtaagcggcatggttccgtgcagcagataatacttggcgtctccgaaaatccatgggttttccatggccgcacggccaatcatgacgccgctgacggccgtattttcttttacataagctacggcctgcggggtggaaatatccccgttcccgatgaccggcacggacatggcccgcgcgcattcgtcaataatgtcccagttggccgttccggaatactgctgggagcgggtgcgcccgtgaatggtgatcatggaaattccctcattctccagcaggcggcacgcgtccatggcgcacaggctctgaaaatcccagccaatacgtattttggccgtgacggggattctctctcctacggctttcacgacgcctccggcaacggaagccagcaggggaagatctttcaggagggaggaacctccatttttgccaaccaccttgggaaccgggcagccgaagttgatatcgataaaatccggcttctcatggtccaggataattctggccgcctctcccatgtggttcccatccgctccgaagagctggatgcctatggggcggtgggcattttctatctttgtgtacctgcggtttctctcccatgcctggagaattccttccgcagagacgaattccgttaccattacatccactccaagctccttgcagatagtgcggaaaatggggtccgtcactccagccattggagccaggaacagcgggaaatccgttttgaagaacgggaggggagcgggacggttggaaaaagtcatgattccttaggatgaggctagcacgggttcccgtcccattcaagcatcttgcctgttctggcgaagaagggaaggtgcaagatgccggtgctgtgcaaacatcggagcgtcgaaaatatggcgctcaataaagaggtgcagtagtccgcccggttttccggaggaaattgcaggcgcgctggacagtatcgtttgttttcgggaagaaaaaacggcttcactttttgagtgaagccgtttggcaaaagttgaaagattgtcttaatggttgccgcagccgcaaccgccgtccttatggtcgtggtcgcacttgccgtcgcaatcgcaattttccttgtcgcactggccgccgcaggagcaggaggactgggcgctcatggcgcgctggcgggcttcctctatttcttcaggagtgggagcgcggccaaggtcaatggacatgcccagataatgattgatggtgttcaggagttcgtcaatggtctggcgcgcttccaaaaagccgcgggccgcatcattcttgatgacgttttcacgcagggcgtcagatttggaaatttcctcttcggtaggaggcattccggccaggtgcttgttgcgcagttcctctccgtaagcgtttacttcttcaaaaagcttggttgcttccggattttggaaaaagagacctatttttgccttggaggccacaaccttgtcttccttggcgagcagattgcaaagggcttccgtggcggagcgcaggttgtcgttgagaacgggggtattcatatgagatttatttaatcatgccttttcgtgcagggcaatccggttgcgaggcatggcacgcatttccttgccgcaggtttgctgcaggtgggaaatccggaagaataaaaaggcgttccgcttgacgtggaacgcctttttatggtgatcaacgttttttaatgcgccttgcagaattcttcaaagcggtccagagcttctttcagaatgtccagcgtggtgcagtagctgatgcggatggccttgtcattgccgaaggcgatgccggggacggccgcgaccttgtagcgttccagaagcttgtcgcacagattcagggaggtgagtcccagcctgcttgtgtccacaaagaagtagaaagcgccctgcggctccacaacactgatattcgggatggcgctgaggcgggagtaaacgtactggcggcgcatgtcatattcgtcgcgcatgtcgctgatgaagctctggtctcccgtaagggcctcaatgcctccatactgggcgaacgtgcagacgttggaagtggtgtggtcctgaatcatctggatggccttggcaatggctgccggagctgcggaatagcctaggcgccatccagtcatggcgtagcccttggagaagccgttgatggtgatggtcaggtcgtacagttccggactgagggaggcgatgctgacgtgcctggcgtccccgtatacgaggtgttcgtaaatttcatcagccaggatgaggatgtcttcgctcagggccacttctcccagggcgcgcagttcttcttcggaataaacggacccggtcggattgttcggggtagtgaggatgaccatcttggtgcggggggtcatggcttcctcaaattgttcggcggtaagcttccatccgttttccgccgtggtttccacgatgacggggatgcctccgcacatgcggaccatttccggatagctgacccagtacggggcggggatgatgacttcatccccctcggatacggtcgccatgatggcgttgaaacaggcgtgcttggcgctagctcccacggtgatctgggtgaaatcgtattccaggttgttttccctcttgagcttttctgcgatggcctggcggagtgcgggaagaccggcggaaggcgtatatttggtggctccgttgttcagggccgcgatggctgcctgcttgatgttttccggggtgtccatttcaggttcaccgcctgccaaaccgtaaacttcttcaccggaggctttcatagccttggcccggttggtcaccttgagggtcagggaaggggtcaatgccgcaatgctgggggaaatcatgtccattgttgtggtgcagtcgtagattttgatgccttggcggaaaacaggctgttctccgcataggcggaaaaactttactcattgagcgcacccctggcaaggagaatgcttgcggcggccattctttttcttgcggagggcgttcctccctctatggaagggatttttcccgtcagcgtttcaggaatttggcgcgcaccgcttccagctccggcgtcttcagcaggaaagccgccgccaggtaaacgatgccggcgcaaccgcagaccagggatatccccagcaccctggccgggaaggtccagttcaggaagccctggaggaaccatgccttgcctgcccagcacacggcccccagcaatattcccgccgccatgatcctggccagtccggaaagcagcgtccgtccgtctacgccgcccagctggcgtcgcaggtaaaagaaataaaagagaaaattgaaggtagtgaccacggaggtggtcagcgccagccacgccgcgtttttatgcaggatgtagacgaaacagtagttgaggccgatgctgatagccagagccacagcggcggcaatcaggggaacccagcgtttttcaagagccaggaagacgggctgcaccaccttggtcccggcatagcccagcaggcccagggaataggctcccagcacttcccccgtgtaacgcacggcctcctggttgaagcggccccactggtatacggatgagacgaattccgttcccaggatggagaggatgagaaaagcgggtaccgcaaagaatgccaccagccgcaaccccttggcgatgtggacagccacctcttttctgccgtctcccaccatcatgcgggaaacagcgggtagcaccaccatgcccgtcgcaactccgaagagccccacgggaagctgccagaggcggaacgccgtggtcagggcggtgacggagcctttttggagatccagagcgaaccccgtattgatgaagatggtaaactgcgtcacgcctgaagccagcacggagggaagcatcagcccccagattttgcgcacgcggggatcgttccattggaaattgggtttccagcggaagccggttttgctgagtttggggagctgcacggcaatctgggccatgcccccgatggtgacgccgcaggcaaaaccgtacaaagctttggggccgaaggatggatcaatgaaatatccaatcagcaggccgagcaggatggaagtaacgttgaaagcggcggaggccagcatgggcaatccgaaaacccccaccatgttcagcgcccccatgatgagggcggacagggaggcgaatccgatgaaaggccacatgatgcggctcaggtccgtggcgaacaattgctccgccagagagtgatccccgctgtagagggcttccatgacgggccctgcaaatagaatccccagcgttacaatggcgatcatcagggcggaaagctgggtagctgccttgttggtcagttcccacgcggccgcgtctccctgcgcctcccgcgttttggaggctacgctggtataggattgggaaagagccccttccgcgaacagatcccttaacaggttggggatacggaaagccgtgtaaaaggcgtccagggctcccgtggccccgaacagggaggtgtacacaatttccctggccatgcctgtcaggcggcaggcgaagatggcgccggaggcaaccaggctgttccgcatcagggacatgaaagggggggaatttacttgaacagctggcggcaatacggctccacccgtttcattgccgggttgtccttgacagcctggtcgcgatcatcccggcaggggaaaaggtacagggcgtatcccccgtagccgcctcccagatatttttttgcaagggcattgggaatatccggcagggggcgcattccttcgtcaagctgcacgctgtagtacagggctacgcctgccgccagtgtattgatgttgcgttccagaactccggtgcgggcaatgagggaggattgggagatgcgtacgtagtcccgttgttcatccgccatctttggggtgtcgtgttcttcgcccgtatatagaatggccattcttccttccaggaagtcgcccgtgcctttgacatccagcaccggagaactgccggagcgccatacgcacaaccccgtttccgcaatgacggcaggatcctgccaaccgacgcccagagcgagttcggacgcgaccggatcgcgcccttccagcatggcccacgcgccgctgcctcccagcccggagcgtttttcatacggccattcgcagagggaaaccatgggggtgatggcgcagttgaccacataggaaccttttctggcgtagcggggcacgtccagccatcccccggcaaagtccacgcgaagcggtacggcggacggagccttgatgcggttcaccagcatggtggtggagacgggagtgaatttggggggcgtcttggggagcaccacgtaattggctccgacgcgggcgcacagctccttcttgatatcgctgtaaagatcatcttctgtcacagccagaatgtccggtttttcctgaagaaactcttcttcaaaatccaggccctttttcatgccggtacccaggataaccttgtcaaccatgcgcaggctttccagcagaacttttttgtgttcgtccggaatggacggcttgcgctgcttgtggtgccacagcacgggttccgaagcgaaagagacgattagatagtcgcccagagcgcgggcttcttcaaagaactggatatggccagcgtggacgatatcatagcagccggagacgaaaacttttttcatgcgtgtaatgatagataattagtctgcaacagtatgccctattgccgtgccggatgcaagagcgagatgaaaatgcgttaaaaaacggcgcggactacagaaagcccgtgccgtttggggataggaaaaatcaacttctgcaaaaacggtcaggaagccatagcctcctggtagcggcgttccacatcgccccagttgatcaggcggcagaagtcttcaatatagtccgcccgaaggttctggtgcttcagataataggcgtgttcccaaacgtcacagacgagaatggggacgagaccgggaatttccagattctgatgtttttccgccccgcagattaccagcgtcttgctgatggggtccacgcccagaatgccccagccggaaccttccacgccctgggaagccgccttgaattccttcatcatggcttccagagaaccgaatttttccttgatggcatctaccagaggaccttgcggctcttttttgggatcaggcgtcatgttggtccagtaaatggtatggagaacatggccggaagcattgaaggacaagttacgcacccagttggtggtggcggaagcgtccagtttcccgtccgcaatttcacggagcttttcagccgcggcattggctccggcgacataggccgcatgatgcttgtcgtggtggatgcgcacggttttttcatccagcatgggttcaagcgcgtcgtaggcgtacggaaggggtggcagtacatatttgccgtcggcatagccgatcgtggaggggtcttgctgtttagtcatcttgtgctgtggttgtatgaatggccctgttgcccgggcctggctgattgttcccagcgccgccaatgaggaaagagcaataaaacgccttctgttcatgtccgcgccatgggaatgcatgggtttttggacatggattgttttggagttgttcaaaaaacaggaacctcggtgttttatttttcttcttgtagaggcagctgggaaaaagcttttctaccttctggcggctgctgccgggccctgggctccataggcgctgacgcccctgacggcgacagatcctgcatcccccaggaaggatttgggcagggttacgcgggtctggctgcccggcagaaggatgcgcgtagcccactggctgccgtagcgcgcctggacggcccatttccgggagggattgccggacggctgccaggagagggttacggtggaaccattgtccgccacataaaaattctgcggttgtccgggtgtgccggttccgcaccagggcatggcgggcggaacggccatggaggggtacaatctgttcaggtatttctggatgcctccggcattccgcatgatggatttgatgctccagaagcattgcccgggggcggttctggcaaggctgcgggagtagttgacctgcgccgctatttcagaggcggggcggcccgggtcttcgctgctcataatacgtgccgtggcaatgccgggccacaccgggcgtctagagttctgggcggcccaccattgcatcaatgcgggaaagctctgcttggctgggctgcagcgccagtaaagctggggggccaggtaatccacccatccgcgggaaagccacttgcgggcgtcgcacgccagatgctcgtaggcgtccactcccgcttcaatgccgccgggaacgcctggcctccagatgccgaacgggctgacgcccacccgcacccagggtttggaagatttgacggatttgtacatgtcttgcacgaagtcgtcaatgtagccccggcgctgggagggggatttcccgtctccaaagctggcgggagaccaggcgcggccgggagtgggataggggtagaaatagtcgtccaggtgcaccccgtcaatgtcgtagcggcgcacgacgtccatgataaccttcagcgcgtggtcgcgggaggcggaggcgctggggttcatcagcagcacggaaccgtttcgcttcatcaaatcagggcgcgtgagggaaatatggttgcggcctacggcatgcttgacgttggccttcgcccggaatgggttgaaccaggcgtgcagttcaatgccgcggcggtgagcctcctgaatggcgaaagccagaggatcatacccaggattgacgcccgggccggaaagccattggctccacggttccagagaagagcggtacagggcgtcggcgttcgggcgcacttggagaaacacggcgttcagcttcaactgggcgcaggtattcaggatgttcagcagctccgcgcgttgggctgctccggagaggccggaacgggagggccagtcaatattatgaacggtggatatccatgccgcgcggaattcctgggggacagcgggaacggattctccggaggtctgccacccaagcgcctgggaagccagggccagcagagagcaggagaaggcatggaacaggggaaatctggtcatgacgggaatggagagggatgtttccagaatatttaacgcctattcggaggatctgtccatgacggatgccggaggtttcgtcatggacaggcgcccctcagctgggccgggatgccaggctgttgatcaggtgggcgttgaaaccggccccgaagccgttgtctatgttgacgacggaaacaccgttggcgcaggaattcatcatggcgagcagggtggttaccccgcggaaattggctccatagcccacgctggtaggtacggctatcacaggggcctttaccaggcctgccagcacgctggggagagctccttccatgcccgccacggctaccagcgcagtagcttggcggatggagtccagatgggaaaccaggcggtgcaggccggcaacgccgcagtcccggtaccggactactcggctgcccagaaattccgccgtcagggcggcctcctccgctacggattggtccgaggtccccgcactgacgatgccgacgaagcccgccgttcgcggaacgggattcggagcaatgcgcatgagacgggcttccgggtgcatgtccgccgccggaaaggcgtggttcaggtagtccagagcttcctcgctcagacgcgtggccagaacattttgtccggcggcaagcaggctgcgggctatctcttcaatctggtccggcgtttttcctgcgccgtaaatgacttccgggcaccctgtgcgttccaggcggctgtaatcaatgtccgtatgggaaggagcgggtacggtgcaagctctgattttttccgccgcttcctccgcagaaaggaggccttttttaaactgatgcagaatggaggtgatgtcgttcatgagggttcgttcatgctccctctggaatatccttccagatccagggtgatgcgtcggaagcccagttcccgcagccggcgtgctacggtggaggcaagctgtccgtcccagaacagtctgcgttccttttccggcaattcaatgcgggccaggctgtctccgtgaacacggacacggcagcctttcagccccagggttctcaggaaagattccgctgcgtccacgcgtctcagcagaacttccgttacggggcggttgtgttccaggcgggtcagcaggcacgcataggccggtttgccgctgactgattccggaagacccagccggcaggccagccagcggatatccgccttatccatggaagcttccagaaagggactcgggatgccgagctcctgcaaagctttgtggcctggccggtaatcgcccaggtcgtcaagattggaaccgtccgccagcagggggaaccccatctcagacgctctggctgccagggaggaaaacagggcatgcttgcacaggtagcagcgcaggggaggattattcgcaagggcgggaaggatgggaaacgccagtttttcctgccggacgcccaggcggcggcacaacgccgtgctgtcccgcacttcctcctccatcacgtagggcgttcgcgcagtcagtgccaggcagtgatccgctcccaggatacggacggcggcggcaagcaacacgctgctgtccagccccccggacaaggcgacggcaatgcgtttcctggggagaaggacggcgcgaagccgttcaaacggagtctgtggcgtcgttgtcatgggaaggtatgggaaaaagccccatcagctggcattgttccagcggcagcccggttttttccgccaggattctgcaatcttcaaattccgctttccggtaatggggacggccgtgcatgaaagaagtttttacatgaaccgttccatggggagtgtggacgggggcgctttcccggcgcagaatatggcggagcatgccatgctgcctgatgcccggcgtactgctgtgccggaagaaggcttcccgcacgcggtccgtctgttccggctggcacagggcgcaaaccttgactgccagacggcctttcttcatgcagacggactcctgccaggtatccagagcgcctgcctccatcagcttttccgccaggtaggctgtctgttccggcgtcatatcgtctatattggcgcacagctccgtcagcagttccggggaagtttcctcttcttccgtttctaccagcatcactcgcagaatattcggtacgggaagtccctggcggtggccgattccatagccggttgcggtaatacggcctgccagcggagcggggacgggctgcgccagggcggcaatgtaggcggctccggtgggtgtagtggcctcatgggtggttccattcaaggtggcccggaaatgtttcgccagcaaagccgttgcaagcgcaggaacgggcattgttccgtgctggcaggttacggtgccagaccccagctccaccggtccggtgaagacggcgtccacccggagcatttccaggcagatggcagctcccgcgatatcgatgatggaatccaccgcgcccacctcatggaaatgtacttcttcaggagtagtgccgtgtacgcgggcctccgcctccgccagcagggtgaaaatagaaagggccgtccgctttacggtattggaaagggcgcttgtctcaataagctttcgtatatccgccatagtccgatgatggtgcgcatggctgctgccggagtgcccttcttcctccgtcagtacgtcaatccgtgttccccggatgccgtgctgctgcgcccggcggcattccagcttccactccccgtgcacatgcaatttggacagttcccgttccaggttttcccggtccgctcccaaatcaatcagggcggccagattcatatctccgctgatgcccgcgctgcaatcatagaccaaggctctcatgatggctcagtgtagaaggaaaaactcctggctcaaggtcaaaatgagccttatcccgggagggggcccggtgcttggcggaccgggtttggcggattgccgtccggttatgagaaagatgccctgtgaaatacattgctagggaactttaaatatgccacaatccctgcggcgctgaccagcgccgcccccgttctatatcatgtccattccgttcttttcgaaattacgatcccagaagcattatcttcaactggttaagccggaattgaagcaggtttccgagtttgttgaagcgcaatcatcatgttttgacccggaagtggccgattacatggaaacggtatgccagtccaagggtaaaatgctccgtccggccctggttctgctggttgccggtgctacgggcggcatcaagcctgcccatatccgcctgggtgctttgctggaaatggtgcatctggcttcccttgtgcatgatgacgtgattgacgaggccgacaaacgccgggacgaggctacggcgaatgccctctggggcaacagcctcgccgtactgctgggggatgtcctcttttcccacgccatggtgctgggtacgggattcggcagcacggaattctgccgcaggctggcgaataccgtcaggaacgtatgccagggggaggtggcccagtccagccgcctgtatgatctgagcatgacccgcgaggaatattttgaaatcatccggaaaaaaaccgcttcccttttctccgcagctacggggggggctggctggatttccggagtaaccccggaagtggaggaatccctttaccagctgggggatctgctgggggtagcctaccagatttacgacgactgcctggacatggtgggagatgaagacgatgctggaaagacgcttcatacggacgccaccaagggcaagctgacccttcccatcttcaatttgctggaatgcggtgacaggaatgtggaagccactctgcgggacgccattgaaaaccgtgaagtggtggattactccgcctttcaggacaatcccgtttttgcagaggctctggacaaggcgattcaggtagctctggagaaaaacgaggcggcccgcgaaattctgtggctccttccccaaacggaatatcgtgaggctttggcggaaatgaccttttacatggacgagctgcttaacgactgccgtatctcctgacctgcttcaaggagtttttgtccggtcatgccctccttatgtaatttgtgtcttccggcattttcccaaaaggaaacctgccggagggaatgggaggagcgcatgctggttacggcctgattgttttttcaaaacatggttaacccggccacgcgcccggggaacggcagtgctttctttattccgtttttccgtacctgcgcgcccggaaggagtaggcgaccgccaccacggcggcgagcacggcgtacaggatgaagcggtgagtggaaatggcgttggctgattctccgttggacaggaaaaaagtaattgcggctaccagcatgttgcctgcaaagatagtgaggttccagaaactggtgatgaggctttttaaatgcgccggggcttgcgtataggcgaattccaggccggtggtgctgaccaggatctcagagatggtgagtacgcagtaaggaatcagctgccatgcgatggacatggaggttccttcctccagccggtattgcaggaaagcgacaatcaggaatgtagcggagctgagggccagtcccgttccgaggcgcaccaggggccttgccagcgttgccgccctgggataaacaaatacggtgatgagggggatgaacaccatgacgaaaatgggattggccgcctggatttgggccggcccgatggaccaggaaccgcccgggagcgggatggaaagaggaatcatcctgctgccctgggatacccaggaagaagccgtctgttcgaaaatggaccagaatgggatgataaaggcgaagatggagaggattttcaggatgtgccgggtgtcttccacggcagaggttccgcagcgctgttctgcgtttttccagcctccgtggaacagaatgatgaaaaggactttccagaagccaggctgcccgctgttccgggccggaggtgttttgtggtattttttgcggcccagccaaaagacgaaagtggcaactcccatgaaaaggcccgggacggcaaacgcccaactgtacccgtaacgctgttccatggccggaatgaccaggaaggagaagaaggagccaaggttgatagcccagtagaaggcattgaaagccttggtcattaactgcggggacttattaggaatctggtctcccataaaggcggagacgcatggcttgatgcctccggctcccagagcgatgatgaacaggcccgccatgagaatgtaacggcgcgcttcaatggtgtggaaaagatccgccgtcgccagaactccgtgtcctacgcagtaaagcagggaaatataaagaatggttttatatcggccccagaccttgtccgccagccaggcccccgccaggggaagcagataaaccattcccacaaaaatatgaagggtggaggtggcccagttgtcgctcatcagcaggtggcccgtcatgtacagcatgaggatggacttcatgccgtagaagctgaaacgttcacaggcttccgttccgatgatgtatctggactgggagggcagggcgctcattggatgatgaaaaggagggagatggagaaggagtaataaaaatgatggcctccgggcggaggccatcatggcgaatgcgttcagacggtgttcagggcctgtgagaaggagacgggctcactgacggttgtcatgaaaaggaaaacgttagcgttcctggttcaggatgggagcgatttccaccttatattgggtgatgcacgctttcagccagtccagcatgatcatggattttgcctgggctgtcagagccggagcaatttgctgggtagatttgatttggaattccggcgtatcctccagttcgcgcttgacgagctgggtcagcaggatgccgtcccccgtgttgatgggctgagccatctggccggggttgatgacggaagccgcctggaatacttcttcaggggccgggagctctttgggaggggccaggcgggaattcatggcccgttccagaagagactggagctcttcctgtgttttggcgttttgcaggttgacgctgctcaagagtacgtttggattgacaaagggaccgtaagaggaagttttggcaccggcttttccggcaatggcattgaactgttccacggggttttctgtcttctgcaattccgtattgagttccgtggcagctttattcatggattcaacggtcatgctttccagcaggtcggcgcgggcgctgttgcgggcggtctcgtaaggcagggctttgaccggggtaatgccttccagacggatcaggacgacttgtccgttttccagcacctgcatggtgctgatctgttcggctccggtcttggcgcgcgcttcttcaatggccttggcatccgcatccgcactcagggccggggctcccgccagggagaaagccacatccagcagattggcgctgcgtccgtcggaagcggattggttgattgcctggttgatttcctgaggcgcgtttttacgcgttacggccgtgtaggactttttctccattttgcagacgccgggagtcttggccagggcttcgctgatggcctggtccatgttcctgccgttggtggcgttcagcggttcccagatgtcattttccaccaggttcatggtctccatggtggcgttggaaatgtctccgggcttgggtgcttgggcatcgcctgcgggaatgaaggtgtaaacggtgaagaagcgagcttcctcatttttgtaattttccttgtgcttgtcccagaaggtttttatttcctcttctccgggatccgtcttggggcggaaggcgcttttttccaggaaggcggtgttgattgtaatctgctggctgttggattccgctacagcctcggcaaaaccgggctccacggagatacccccggccagcacgtctttgatgcgctccaggctgatggtgtcttccatcagaccgcgcagcagttcctcctgaagctttttacccatgttgccgcgcatggaaatgaaattatcgtatttttgggggtcgaaaacgcctttatcgtcctggaactctggaatattgcaaatggcatcgtcaatttccgcggtgctgggagtcaagcccaggcgtcccgcctcccggcggataatgccgcggtaggccaggaaagccgcattgggattatttgttttcagcagatggcagagttcgcgcaggttttcttccgagctgaaattgtcctgaagcagcggaccgaaggtggaagggaaggagaaagccacggacaggccggtcctgcccatattgttataatccttttccccataagatttcccgtccacggaaacgaaagtctgcttgaacatgccggtcagggagccgccgcttacgtccccgccgacgaacatgaggcccacaaacaccagggccatggctgccatgatgacgattgtatgtttacgtaagtaatctagcatggaatgtcaggttgaaaatgtacgtgtagcaggccatgagctgacggcagcccgggcagcccgaaccttttacactttttccctccgctaggcaagaacgaagctctccgcttccggcggcttttccagaacatggcggcatgctctttcctgtcatgaagggcttttccggccggggctgaacaatttttgacctcgacggtgatgcaaatacgccttatgttgctcctgcgcggaaggttccggaaaccatgggtcggttctgtcccatggcattcggaagcctccggtgcatgtccttagccggatattcctttaattgcaaggatttatgctgaaccaggtagtagaactcaaaagagaagtgacggcggtccagatccccagcggggatgtgctcaccctgccggaaggggaacgcgtgtatatcacccagatactgggcggctcctataccgtggctacggaccacggcctggcccgtatctccagggagaacgcggacgcccttggcgctggagcggaggaaccttctccggaagcggctgcgctggatgagaacgccacactggaagaaagggtctgggatacgctgaaatgtgtgtatgacccggaaattcccgtggacattgtcaacttgggtctgatctacgatgtggccgtcattgagctggagaacggccttcatcatgtggcggtaaaaatgactctcacggcgcccggctgcggaatggggccccatctggtcatggaagccaaggaccgcattgaagcgttggaaggggtggaggctgcggatgtggaaatggtgtgggatccccctggaaccaggacatggtcagcgaggagggcagaatgaaactcggattgatttgatttcccatgccggtgacgttgaaattgtccgacgaggaagcgcgtgatttggcggaaatgctttccactgccgccacggtggctgcctccaaccagcaggacggggcggaggcgcgtctggcggcgtgggggaatttggtttcccggctgatgaaagagctttccgtcacctccaaattgaaagggcgcattgcctatgcggatgagctgggtggctatgccttcacccgggaatatgaagaaagcgcctttttccaggattgcctggatgaataccgggacaactctttttgggcggatctcgtgacgcgtatggcggacaaggccatcagcgaacacctgggtccggaatattttgaaaacatgccggaggatgaacgccgccgtactgcggaagccctggaaaaatccctgtggcaggaatgcgccagatacggcattgaccggctgggcttcatcttgcctccgtcagacggataaggagaagaaccgtttaaaaatcctgtggaccggtgcggaccgaatgattcgggcgcgattcgcgtgcatatccccggagaataccggtccatgttgcctgtctgccgggaaatactcccttatatccgccctgtttcaggtatcgggacgacatgcgctctctctggatgcggcaagatgattttgggggagttgttcagtccggagtgcagcggttcaccgggtcggggccttattcctccgcattttccggcagtggcggggtggggctgcccagatattccgtttccttgggggtggagagtactttgtaatacgcccaagcggcggcggccagtacgccgccgatggaaacaatcatggttagccagccggtgggggacataatcagttaatgttctcctgaacaagactggtaacggccttgtcaggcaggaccagcttgatattctggggcaggggacgattttggaacagcttgaaatccgtcattttcgtagttccccccgtctgaagcagcacggaaccatcaggctggatgttcgccatgacgttggtggagggggttgggtcgccggtgaacgttacgctggtattgggatgccatttgccgtccttgtacgcgaagctggggccaaagaaggctccgcgggccttcttggctgattcaaaattacgcatgaaatcttccacgaatccgacggagaaggaaagttccttttccgaggaatgcgttttccatttggaaataagatcccaggacccgcttttattattaaagtaataaccgctgatttccttgaatttccccatttttttgacgcagacgaggaagcgcatgttctccccgattgcccagggatagtccacgaagctttgtccgcctgttccttcaccgccaaaacgtccggagcgcgcatctttgcccagttttaccagcttggtacgttcttcttccggcacatcattggggttgtctccgtgtgccaccggatcccagatggagaagatgattacttttttaccgttggattgttcctgaaaaccgatatagccgtcgtcaaaattcatggcgcaaaagtaggtgccgggaacggatgttttggctttcactacattgtacagggcgcttgcctgggagggatgcccctgctggttgatatggacggaacggcactggcgcttggccagcagttccgggtcctgcgcatgaaggatggttccggagaacagggcggcgcaaatgacggcggcggaggataaaagacgcatggttttgaatgattgatggttgtctgatttgatgcccggagggtgggggacaggcaaataattaggacaggctaattacgtttggcctgggggaaatctcgcaggcaggccgcacttttttcaaaatttttccggcatgaatgtgataaaagaaatgcctgacacaggcgggttgctcaagattctgaaacggctgaaaccttaagtccggaaagccgggcaaccgcaccctctccttccccttcccgctttcagcctgctgacgcggaacacgcggctttgcctgaatggggaaggccgttctgcgaaaaaatcgggaaacggccttcggaagaatgggggaaaaggacgcgtttgttatcggatggggttcaggaacaggggcatcaggccccccagcacgatgaagatggaaaacgcggccagcatgactccggaaatggccggtacctgcacgggttctgcgttttctgcgggcttgtcccagtacatggagcggatgaccttgaagtaatagtaaaacccggatgctgcgcagacgatcatgacggggagcatccaacccagatacagacccgtattgatgacgtgcacgaaagaaatcattttggcgaaaaatccggccgtcagcggcacgcccgccagggaggcgaacatgatggtgaccgccagcgccagccggggattggttttgcccagaccgcggaacgcggaaatttcctcgctcccgcgctggatgcggatcatggcaagggcgaaaaaggcgccgaaggtcatgaccaggtacacagccaggtagaacggggcgttcggagccagctggccgtccacagtaccgataaacaggggcagaatgaagcctgcctgtgcaatggaagaataccccatcatgcgtttcaggttcgtctggggaatggcgcccaggttgcccaccagcagggtggcggcggccatcagggctacgacgaattcgacgggaggcagcacggcgaatggggccaggatgatgccgagcagggcgaatccggctaccttggaggctacggaaaggaaagctgtcaccggagtgggagctccctggtacacatccggaatccacagctgcatgggaactgcgccgattttgaatgctgtaccgagcagcagcatggcgagggccaggtacatggcgggggctgtctggccggccagggcgtggctgacgatcgtttcattataaatgaatgttcccgtaatgccgaaataccaggccaggccgaaaacgagaaaccccgtgctgacggcgcccagaatcaggtacttgatgcccgcttccgtggaacccaggttccgccggaagtagcctaccatgataaaggaactcagggtgagcacttccagggagacgaacagttccaccaggttggatgccttgcacagggaggtgatgcctacgcaggccagcaggggcaggatgtagaattcccccgttccgtcctgggatttggaatcattggaggaaaggttgatgacggcccggaaatctacggaaagcaacagggtgactgctgtggcgacgagcgccaggatgatgtagatgttgtcatagagcccttccatgtagaagggaagcatcgccagggttcccgccgcgccaatcagcccgaaaataaatttgggcgtttttttgcagaaggtctccgccagaagcaaaagcattgccaggccggccaggatgaattccggaatatacgcttgcatgggtaaaagagaatcaggttagactaggattgtattcggaagggaggaaatcaggagaaaaactggagcaccagcgtggggaagaagccgaagaccgccagggcgatgaccaggaagcagttggccgcccgttcggagggctgcagttccgtggcgtaggcggaggctttggacaaatctccctggaaaatattgcggtaggccctcagcatgtataccgcgccgatgaccagtccccagaggcacaggatggtggcgatttgaacggggccgaagccgttgctgaaaccggcgaaaccggagaagaagaccatgaattcccccgggaaattggcgaggccggggaggccgatggaagccatgcccgccaggccgaaaacgaaagccatgcgcggcagcctggtgctcagtccgcccagagagttgatttccagtgtgcctgtctgcttttcaatctgcccgcagagcagaaagagaagggcgattgtcaggccatgggccagcatcagcagggcagcccctttcagcgcccagggattggctcccgcggaaccggaaactaccagggcggcgaaagccaggaagatatagcccatgtgcatcacggaagagttgcccagcagcaggtccagccttttctggttgacggtcacgtaccccacccaaatgacattgcagacgagcaggaccagcaggatattcgtccagggaaggaatcctgtttccatcagcggctggaacatgaagagcccgtacaggccaaatttcttaagcactccggcatgcatcatcgctaccggagcgggagcggatgcgtatgcgggggctgcccaggaatggaaggggaagagggaaatcagcgtgccgaacccggcgatgagcagggccccgatgagttccgcgtgggcaagttcgcgcccgctggccatgaagtctttcaggccggagaaggtgaagccagcctgcatgccgatcatcagcagggctgccagcagcaccatggaggcaagccccaggtaaagcgtggcgcgccaggccgtggtgcggcggtcgccgcgtccatacaggccgatcatcacgaaagtggggataagagccagttcatggaaggcgaagaaggagattatgttgtcggacaggaacgccccggtggcgcctgcggaaatcagaagggcggagttgtaccaggaagcttcccccccctggggcgggttggtgcccaacacggtggcgaaggtaaccaggatggtcagcagcagcattactttggacagggccggaaccaacgtgagctggaggtccatcccttcaaagcgggaccagcaggaagaacagccgtcaaagctaaccagggcccagatgccgagggccagcgtcagggaggcgctgagcagggctgtcgggcgtgcgggcgccttgcacagaccgatgagggccgcggcaatcagaggaatgagaacaagccagataagcatggtatgtgattggttggttaggttagcaggaatagaagacggtaaagtagatgaccaggagcaggccaatgccgaagagagccgtataggcggccatgttgccggactgcaggcggcgcagcagggagcctatggcggcggtcaaccgcgccagcccgccaacgatgaggccggagatgatgaactggtccataaagtcgatgatggcggccagaacgccctggactcccctgaccagcactttatcatagaacagatcaatataaaggcggttggcgagagcccgggaaacggcattgccggagagtttgtcagaagccggggatcctgcgtagaaggcagccgccagcaggattccgagcaccagcgcccccatggagacgtagaagggcatgcccatgtggaagctttcggaaacgaatccgttgaaaggaaccagcctgtctgcgatgaacccgtagccggagatgagagccaggacagccagaatcagcaggggcaccagcatgaggccgccaacttccgaggcgtgttccgaactgtggctgcggctcttgccgaagaaaaccacaaagatgacacgcatcatatagaaggttgtcagcagggctacgcccgcgccgatccagaagaagaccgggtttttgcgaagggctgcttccagaatggcttccttggagaagaagccggacgtgaacggaatggcaatcagcgccatggtggcaatgatgaaggtgagggaggtcagcttcatgcgcttcatgatgccgcccattttccagatgtcctgttcatggtggcaggcgaagatgatggcaccggcgcccaggaagagcagagccttgaaccatgcgtgggtgaagaggtggaacatggctgcctccccggccagaagtcccagggccatgaccatatagccgagctgggagagggtggagtaggccaggacgcgtttgatgtcattctgctgggtggccatgaaggcggcgatgacggccgtaatggctccgatgccagcaatgacattgcaggccagggcggggaaggcctcaatgccgatggagtattggacgcgcaccatcatgtaaacgccggcggctaccatggtggccgcatggatcagggcggagacgggggtggggccttccatggcgtccggaagccagacgtgcagcgggaattgggcggatttgcccaccgctccgcagaagaggcacagtaccgtaatgttcagcaggttttcactgattcctgcgggtatttccatcaggctgaaatccagcgtgttggtcagcgcccagagagtcagaatgccgatcaggaagccgaagtccccgacgcggttgcagatgaaggcttttttagcggcgttggcggcagtgtcccgtgtgtaccagtggccgataagcagataggaggagaggcccaccaattcccagaagataaaggtcatggcgatgttgttcgccaggacgatgcccgtcatggagaacatgaaaaggctcaggcatgcgaagtagcgtgttttggccttgtcgtccgccatgtaagccagagagaaaacatggaccagcaggccgatgcccgtgaccaccagcatcatacgggaggaaaggggatccagcacgaaacccaggtccacggaaaagatgtcggaaatcgggagccaggagaaggaatcggatccggtccggtccagcagacccagggaaaggacgaaggtcgccaggcaggagaaggtggaggtgagggccgcgacgtcaggacgtttggtcagcaggaaccagtcaaaggcggctacgaccagcggcaggaagagcagaagccaggtgtattgaatatcaatattgaacatgttcgtggagtagtgtgttgctcttagtctttcagcgtgttgagatcttgcgtgctggccgtgcgcctggccctgtacagggagacgatgagggccaggccgatagccacttccgctgcggcgatggtcaggataaagatggagagggcctggccgtcatagttgggcaggcccatagtgccctgggcgcgggaaaacgctaccagggacaggttggcagcactgagcatcatttccaggcacatgaagatgacgatgatgtcgcgccggacaatcacccccatcaggccgatggcgaacaggacgccggagaggatcagataatgcgtaagaggtatcatggtgatggctgtggtaaggggttctttattttccggaagggcggcggctcagcacgacgacgccgatggaagccaccagcagggccagaccggcgatgaccaggctccggttgtatttgtcaaacagggtacggcccagcagggcggtgtccgggaattctccgttgtctatctcctcacggatggtggtgccttccggatagaggtgggcggaacattggggggagaggggggggagaatgacggaaggggcgccgttgttgcgaaggctacaggcgggagtttccattccggttttggagggggctgcgtcctcctgcccgattttcaaatcgttccaggcctgttccgcgctggccatcgggcagcggtgcgtttctttggcgccgggcaaagaatagatgatgccaataagctggccgaggaagaggccggcgatgatgacaccgatagcgacggagaaaggcctgctgaagggggatgtttcctgcttcacattcagcagcatgatgatgaacgcgaagagcaccataatggccccggcgtatacaaggatttggagaatgcccaggaagtgggctcccagcccgatcatgacggcggcggtggctccaaaggaaagagccatcatcatggcggaggagacggggttgcgcatgaagacgaccatcagggacaggaccacggccagggccccgaaaacgtaaaaaagtatgtcgctggcaaagatgttcataacgtacgggaaatggagtgttcgggggttatttgtattggttccacttgttgaccagccccttgcgggtgccgcccagttcgtagagcttggccttgttgtggatggcctgggttttatccgtgggggtgaacaggtagttatggctcatgaagatggcctgttccgggcaggcttcctcacacatgccgcagtagatgcagcgcagcatgtcaatctgaaattccctgggggctttttccactttgccccacggtccttcctgtatggggccgggggtgatggtgatggcgcgggccgggcagatgaattcgcagagctggcaggaaacgcagcgttcacggccgtcttcgcctttcaccagtacgggagctccgcggtaatatttcggcagatgtttgtcccatctggcttccggatattgcatcgtaacgccgatgccggagcaagccagttcttttttgttgcgggatttgcccagcagagccagaacgaggtgcctgatagtgagccaaagaccgccaagaatggattgcagatagaaccgctctccaagggaaatcttcggacgcttgatcgttttgaaggccataatagtaatgttgtcggaatgaagaagggggggattacttgacgaagtacaggatggcggctgtaaggaagatgttgatgacggccagttcaaagaagaccatccagccgagcttcatcacctggtcatagcggaagcgggggagcgtccaccgcacccagacgaagaagaaggcgaagaagagaagcttgagcacatatgcgatgagctggcagatgaccgccacccagttggctacgttttcattgagccagccgtccaggccgaagccgatggaccagccccccaggaacagcgtgatgacaagggaggaccccaccaccatggcggcatattcccccatgaagaattgggcgaatttcatggaggagtattccgtatggtagccgcccacgagatccgtttcacattcggacatgtcaaacggcgtgcggttggcttccgcaaaaatggaggtgaggaatatgatgaaactgatagctacgggcaccagcagtatccagcgctgccagctcaggccctcgccccacacgggaagcaggagccagccgttggcggcctggtattccacgatgttggacaggtccagcgtgctgtaaatcatcagcacaggaatgatggacagacccatgctgatttcataggaaatcatctgggctgaggagcgcacgccgcccaggaaggggaatttggagttggatgaccatccggccagcaccagtccgtacacggagagggaggagatggcgaacatccagagggggcctacgctgagattggccactgccatgttgacatttccgtaagaggtttgaaggtctccggcgaagggaaccacggccgccgtcatcagcggtggcgcaagcaccaggataggggcgatccagaagtatacgcggcgtacgaaggggggcgtgaaatcctgtttcaggaacagtttgccgccgtccaccatgggctgcacgagaccgaagatggggatgtcgcggtccaggcggaaaaaacggcacaggttggcgattttgccgtcatggggcaacccgaagtagtccagcgtctttttgaacggcaggtcggatttcatgccgaagcggcggaagatgcttaacggaatgcaggctcggttggggcctacgcggtcctggatccaggcggccacccggcgttcaatgtacacgcagaccggaatgaacagaatggtgatggcaaagcagatgacgattttgatcagcagagtgatgatataaaaccacacagggttgctgagcacctcgtcgcaaaaggttagaatcgaatcaatcatggcggattaacaggttgtatgcgtgtgaagtgtgattagcggccctggtttttttcgcgttccaccacgggaatggtgacgccggtttccagaatgggctggcccccgtctccgatggaaccccaggagactccattgagtgcgccgtattccgtgctcatggcggtgaggatgtccagggcggagttgaagtctttcagagcaggattgcctcccagcagaagggtgatgtctctgaaaatctgccagtcgtcccgggcgtatcctatgggctggatagcgcggttcaggcgttgaatacggcccgtgacattaatcatggtgccgaatttttcagcgtaggtgacgcccggcagaaccaggtccgcatggcgcgccgtttcattggcgctgtgggcggtcatgaacaggtagtccagcttgtccagatcttccgccgtgaagcctgcttccggggagatgaggtcttcccccagggagaggatgcccttgatggaaccgctgcgaactccttcgcgaatggcgtccagcctggaaccgggttcgatatccagcaccagcctggccccgttcgtgttcgggttgcgatccgcagaaataagcatgccgtcgctttctcccatgcggggaacgatgtccaccatatccgtgccgatttgggcggccagatggcggaccatgtaaagttcttcattggtcatgcgcccggaggcaatgatggcgagctggttcggagcgatgcgcttgacggcttccgcggcggaagccagagccggttcccaggtggaggggcggtggggcgcttccgcatccgtacggatgacgggctggggaatgcgggtttccgcattgatgtatttgtagttaaggcggtgagagtccggcatccagcaggagtttacggcatcattctggcgcggggtaatgcggtataccttgtcttcccttgtccagagggtgatattggtgcccgttccgcagtccacgtcaatggtctttgtttccttcaggaaccagacgcgcattttaaagcggaaatccttggaagtaagggcccctaccgggcagaggtccacggtgttcatggagtagttgctgtccagctcgcggccggggtaaaccgtgatggcgttgaaggtgccgcgttgggacatggtgagcacctcatcgtgcatgatgtcgcgcatgaagcgcacgcagcggccgcagagcacgcagcgttcctggtccaggttcacgcgcgggccaatgctcaggtttttcccttttttggtctttttctcttcaaaacggccttccacctggccgtagtcgttggagtattcctgaagcttgcattccccggcctggtcgcagatggggcagtccagagggtggctggtgagcaggaattccattacgccgcggcgcgcttcactggccagggggctgtccgtgcggatgcccatgttttccgccaccgtgtttgcgcaggagatgatggggcggggcatccactggatgcgctgatagccgttttcatcataggatggtgtctgtcccggagcgagcctgggcggcatcccctgttccaccatgcacatgcggcaggagcaggcgacagccagcttggggtggtagcagaagcacggaatgggcacgcccacggaacggcaggcgtctgcaatccgcgtgccgcgcgggaaccggtgccacgttccgttgatttggacgttcaccttgccttccgcggcggcaatgtctttggggagtttggaagcttcttcactcatgatgacggatgggagagggatggttttgagaactggtgttgcgtgctgctgtttagcgggtgaggaaacggttttgctccctgccttcctccgtgtggggcagacaggcgttgaatggatccgtcagggctacgaattcctccttgaatttggagaccatggcctgggtgggccaggaggcggcttcaccaaaggcgcagaccgtttttccttcaatctggttggccacttcaatgagcagatccacatccgacggggcggcttttccttccaggatgcgggtgctgagtttcatcatccacggacagccttcccggcagggagtgcactgcccgcaggattcatgggcgtagaaacggttgatgttgttcatggcccagggcatggagcgggagtcgtccatgacgatgaccgcgccggaaccggacatggagccgtgccgggcgatgctgtccagatccagcggaatgtcgaaaaaggtgatttttcccatggtgccgtccggattctgcactttgtattccgcatccgtgcgcatgaccttggaggaggagcctccgggtatcacggccttgaactggcgcccgtctcgcgggccgccgcagacgtcatacagcagttctccgaaggtcatggagccggagacgatttcatagaacccaggacgtttgacgtcgccggaaacaccgataatgcgggtgccgggggaacgtttggctccttcctggctgtaggcttctcctcccatggccatgatgtgtttcacctggcagagggattccacgttgttgacaatggtggggcatccgtacaggccgatggcggccgggaagtaggggggcttgatgcggggataggggcgatccccttcaagtgagttgagcagggccgtttcctcaccgcaaatgtacgctcccgctccgcggtgcaggtggatttccagattatagccggacccctggatattgctgcccaggaagccgcgttcgcgagcttcctgaagggctttgagcatgatttccgcggcgatgggaaattcttcgcgcatgtagatgtaagcctgatgcgctcccaccgcgtagctggagatgaccattccttcaatgagctggtggggatcctgatggacaatgtagcggtccttgaacgtgcctggttcggattcgtcacagttgcaaaccaggtaaacaggcttcgtgttgttcggcggaatgaaggtccatttcacgccggtggggaaccccgcgccgccacggccgcgaagaccggattttttcacctcgtcaatgacggccctgggctccatgccgagcgcctttttcagttcttcataaccgccgtcggccagatagcagtcaatggaggtattccagccctcgcggttgacgtttttcagaatgcggcgcgtttccctggggtggggttctttaccgggaagataggtgatgctcatggcgaaaatctggtgcgtgggaaatggaaagggttaggctgtctgatatttggcaatcacttcttccagcacttccggagtgactttttcgtacaggagatcgttgaccatcatgttggggccaaagccgcagttggctaggcattccactccttccacgctccacaggccgtccgggctgactccaatggggtggtggtggtcgatgccgtttttgtcaatgcccagacgcgcgcagatggcgtcgaacaggctgtccgcccccgccatggcgcaggaaagagtgcggcatacgcggatgtggttttttccggggcacatctggcgcagaccgggatagaaagtcaccacgcccagaacatgggcggcggagatattcagtttttctcccacccaggcaatggcgtcgccgctgatgaagccgaattttttctgtatttcatgcaggatgggcaacacggcggatttttgcttgccttccgggtaatgcgtaacgtattcgctggcggcggcgtcaagttccggcgttacttcaaaggccgggtaaaaccgttcgcccgggctgggctggtgggcgatagtcgcgtcgatggcgttttcagcgtaatcggacatggggagaaagtttggtgtttgcgttgaagtggatgaaagtggcgggtgtttaacggtcgcattcgcccatcacgaagtcgaaggagccgagaatggccggaacgtcggaaaccaggtggcctttcatcagttccggcaggatggacaggttgcagaaggagggggagcgcatgcgcaggcggttgggaagcccgccccccttggagtccaggaagaaacccagctctcccttcgggttttccgcggcaaagtaaacctgtccggcaggggcgttcacccccatggtcgtcgtcatgaactggcgaatcagggattccatgtccgtcaggacttttttcttttcaggcagcgtgcctttggtgtccaccatgttgatggggccgtccggcatggtttcaatgacttggcggatgatgcgcagggactggcgcatttcttcaatgcgcacggtaaaacggtcgtagcagtctccgtgttcgcctacggggacgtcgaattcgtagttttcatatcccagatagggggtgagtttgcgcaggtcccgcttaatgccgctggctcgcaggttggcccccgtaataccccaggaaagcgctttttcacggctgatgacgcctacgccctgaagacggtcaatgaagattttgtttttgagcaggagggcttccgtttcatcaagggttttggccgcttcatcgcagaagacgagcacttccttgagcatttcattgggaacatcacgcgtctgtccgccgatgcgggtataggaggaagtgaagcgcgccccagtgagctgttcgtaaaaattatggattttttcacgttcctcataacagtacaggaaaacggtcatagcgcctacgtccatgccgtacacgcctacgcccaggatgtgggaggaaaagcgggaaagttccagggccagtacgcgcagggcctgtccgcggggcggcagttcccatcccagcagtttttccaccgcgcaggcataggcgatgttgttggacaggggggccaggtagtcaaagcggtcggtgtagggaacaaattggttgtactggatggtttcgcctattttttccattccgcggtgcagatggccaaccaccggatcacagctgatgatttcttcaccatcaagttccagcaccaggcgcagcacgccgtgggtggcggggtgggaggggcccacattcagggtcatcgtttctccgagcggttcggatgtattggtgagatagtctgcgttagcggctgtatctgcaatggcgaaagttttggtgctcgtcttcatgtggatgtccgtgcctggctgaacctgataatggtgccggatgattatgccacttcacaccatgcgggcaagccaaatgtcagtttttttggcattccggggaggtggtgcgcgagtctcctcaactgatgaatgttagttctttctaacaataagcttttatatggaacctgccgaatatgggaaaaagcggattaggaatccgcatatagcgtgaatcccgaaaagaactacgcagggaggctggctacaaaggaagaagattctcctccgctgcgttcggacacgtccagccataaggcccggcagccctgttttcccggcacccgccattcggaaataactgagcaaatttgcattaaattattttttctcaaatttgtaggttgactccggattcctaatccgttaggaaaaaaatatgttgaagccgaggagaattattgtctttcccattgctgtaacattttcagtattatttattttatatattatttcatggttttcccctattgccggggattcctttattcacgacaggacggggtaccttgggcagtttcatatccgccatgtctggaaggcctgcgtggacagttacctgtattggaatcccaggctgggggaaatggctgcgttttttattacttctgctccccggctggtctggacggtcttgaatcccgtgtttgtgcttgcccttgttcttggcctttatgtgctcgctctggggagaatgcccaatctccggcgggagtgcggagcatggacgtggttgtttgctttaagcatgttcgtctcagccggggtaaccgtttattatgtctgcctgacacgcgcaggctccatgaattatgtgtggaccggatgcctgatcgtatggttcatgaatatttacagaaccaggtgggggaagcggataacctcccctcgatggggcctgtcctcaggatgtctgatttatgggattttctgcggcgcctgtaatgagggggcgacgataggaatggcggcggcgttttgcatcatggccgcggtcggcatgttccgggaccgcagggtgggcgcttatgtatggtgcgggtttgccggcgttgcgttgggaggcctgtttctatttgccgcccccggtttgtattcgcggcttggccatgatttgggagcgagtgaagttttgaggaagggcggtttttgcgcctatgcggagtctttcgggatattgctttattaccacgcgaggatgttgtgtaaaatatatgccgtttccgcagtattaacgggatttttgttgttcagcggcacggagcggtgccgggaagtaatcaggaaggaaaaggaatccttcttttatattctttttttattgttgctggggttcatcatgtccgtttgttattttccggtgtgcattcccgcccatcatgttcagttcgtgtcgtccctgcccgttttggcggcgtcaaccgtgttgttctccgtattgtaccggaatgagatcatggtgcgcggattgcgcgcggtgactgtttgccttgccggagcgactttgtttttcggggtggtgttcgccctggagtattatcatgtaggctctcaggctttccagagagaggaactgattcataaggccttccaggaggggaatctggaaccggaagttccttccatctctcctcttttctttgaaggaaaagtgtccggaacggatgggaattggggagggccggataccaaccgccggtttggcatccgcaaactggtggtgaaaaagccctgagggaaaatggctatttgactatgttccggggagtgaagtgcatttcctgttcctcgatgccgaattgccaggtggccgtttgccacatgttgacagcaggatttttccaacggacctggacggttacggggctgagccgcaggggacgggagggagtccatttcaaaattttttccttggcgtcgtaccgggcgtttaccaggccgaagccggagacgcgcatttccatttgcttgggttccaaggagggttcccctgccagggaaatggatatatcgggagtctggtttttcaccacggtattggcggccggataaacgggctgggctggggccggataggaattcatctttttcccgctgctgttgccaggggtggccgccggagtttccggagtggagggaacgttgaaattcagggctctggtaaatgtcttagggtctttgccgaagaccatgtagcggtgaatccgccagcggtccgtgtccttggtcacttttttggggattaccgtaaaggccgcctggaatccggcttcttccgccttggagatcatttccggcaggatgaagccgccaggatagcaataggcctccacggaagaaccggggaatttttcctgaaggattttccgggaattgcctatttccgccgttgccagatccagaaccgcttgtgtacctttccgctgggcggccctccaggatcttgggtacaggtggctgacggagtggctgcccagggtggcgccgttattcagcatttcctgaatctgggcggggctcatggcagaaccgcggcccgtgatgaatttggtgtatgggaaaatggtaaaggggaatcccgtttctttcaggatgggataggcgtccgtgtagacgctcttccagccgtcatcgatggtgatcatgacgcatttggccggaagctgcctgtcccccagtttccattccaggaattccttcatggagatgacgggcactccggacgccttcagcgcctgcatctgggagcggaatacatccgtattcatgcgcatttccgtagcgggaagggtgcggctgaaatcatggtaacccagaatggctacgcgggtttcaggctgaggaaccggaacgggggaaaaagccgtggagggaatggcaaggggtgcctccgcaggttgtaccggggcgtgcaggttcgtttccccgggaatgggctccgcgttagggatggactccgccaggggagcggaagagcctgtctctccgggaatgggttccgccatggggatgtattcatccttgcggttggcttcaatcaggtctttgacgggaacgatgccggcggccgggtttcccttgatggttcccccgatgaccgggccgggagcaaagggaaggggagacgccggcggcaggtcgggcggaagctccgcacatgcgacaccggctgcgatcaagaaaacggaaaggaggcctgggacggagcgcatatctgcaactactatttttaagttttctgttcaaccttaaactcaggcaggcatgacagcctgttccgtgccgcgcgtgttttttccggggcatgtctggattttcccgtttgaatgcgttatcactaaaaagcatgcagactcattttccgctcgcggaagaaaggagaggcgtttagtctgtctgcagacatgagctgtatttgtcatttcttcaaagttctggcgcgccgtgcgggtctgctcactgccgtagctgccgccgttttttttctgggggctcccgccggtgaagcttcggcccgcacggcggctcccgcttatccggccgcggaagtggggggggaatcccagtacagccattttcccattcctctcaatcagtacaatccggtgccgccggatgccagcctgtaccaggtgcttagtgaacgcaacaagcagtccggcggtttcaacctggcagtgacgctcgttttcttcggcgctattatccatacgtttttggccggccgctttgagcgttattcccataagctggccctgcgctacaaggaaaagctcaaggaaaccaacttccgcgtgatgcatccggaagagcgcctcccggtttccttcgcgtccgccattttccattttctgggagaagtggaagccgtgttcggaatctggcttatccctttcatgttcgtgtgctggaagtattattcctttgaggatttttccgcctatttgaattatgactgttccttcacggagccgatgttcgtgatgattatcatgattatcgcttcttcccgccctattttcaagctggcggaatatgtcgtgaactgcggcgccaggcttgggaaggcaacgccgggcgcgtggtggatttccgtgatgtgcctggctcccctgctgggttctctgattacggaacctgccgccatgacgatcggggccctgatcctaagcaaaaaattttacgacctcaagccgaagaaaaccttgatgtacgccactctggggcttctcttcgtgaatatctccatcgggggcaccctgacgcactttgcagctccgcccgtagtgatggtggcggaaaagtgggactgggggctggctcacatgatccagcatttcggatggaaggccgtttccgccatcgtcatttccaatttggcgtattttctccttttccgcagggagttcgcccgcctggcttcccagcagagggagttcgacgagtttgacgacgccgttccccagtcttgggaagaccgcaatgacaagataccgttgtgggtgaccctggcgcatgtctgcttcctggtctggacggttctttttgcccatgagccggtcatgttcatcggcagtttcctgttctttatcggtttcacattggctacgccgcaataccagaaccaaatgtctctgcgtgtgcccatcatggtggggttcttcctggcggggctggtcattctgggcggcgtgcaggcctggtggctggagccggtgctgacgcggctgggggactacgccatggtcggggctacgctgctgacggcatttaatgacaatgccgccgtcactttcctggcgtctacggttcccaacctgccggaagccgtcaaatattccgtggtggcgggcgctgtgacgggcggcggcctgacggtcatcgccaacgcccccaacccggccgggcaggccattctgggtaaatatttcaaaggcatcaatcccctgtggctgtttgcctgggcggcttttcccactgccatcgtgtttattttcttcacctgcttcggccattaatggccggagcgtactgtcactcttatgtttaccggactcgttgaaacaacaggaactgtggaagggttgacgcctattaacggcggagccaggctgacgctgaccattccgttcggccgtgaactttccctgggggattccgttgccgtcaacggatgctgcctgacggtggatgccctggagggtgaacgtatctcctttgatctgctttcccagactctccgcgtcaccagtctgggaaccctcaagccggggatgctggttaatctggaacgcgccatgtccgccatggaccgtttcggaggccacttcgtgatggggcatgtggatcataccggtacgattgccgctctggagcctgtagggcaggaccaccgtttggaggtgcgcattccggaggaactcacccgctattgtattgacaagggttccatcaccattgacggcatttccctgaccatagccaatttgagcggatctctgctggagttctggattacgccccatactttcggccgcacgaatctgcagaattccgttcccggccagccggtcaatctggaagtggatatgctggccaagtatgtagagagactgttttctgcccgtgaacaacgtgcggagggatagtcctgcccgtaaggagaatcacatgccgggcatgcgggctggtttttcctgccggacaatgaaagtgcattcctgttttctgtagcaggggtgccgggatgcggagatttttgaactggaagccgggtattgctgttccgatgaaggaagggccgtgagggcggaacaaaaatgcggagcgagtctatttgctaccgggccattcctccctttgccgtaatccatttcccgcgtttgacgacccgttcaaagaacagaccgtgacgttccgctgccgttttcgtttcttcccactgggaagccagaatgccggagatgaccaaagcggcatccttcttcatggcggcgatgatttgtggaaaagccttttgcagtatggttgaaaacaggttggcgacgacaaggtcaccctgctgggattccgaaggtttccatttgaagacgtcttccacaaataagtccagctgttccgccgtaacggcgttgcggaccatgttgtgccgggccacttcaatggccatggggtcaaaatcgaaagccgtggcgtgctccgcccccagcttcagcgccgccatagccagcacggcggttccgcagcctatgtccgtcatgctccatgatgtttttctgcgggatttggcagcgtcgcagataaaacgcaggcaggtggatgtggtagcgtggtctcctgttccgaaagccatttcggcggggacgctcaggatgcagcgcgaggggaactgtttctgcagagcggccagattctccggagaactctgctccgtaatgaccagtgcgtcccttattttgagcggagggcgtttttcccgcttctgggtcgctacccagtcctgcgtcttgatttccctgacagttcctccaaaatattttttcaaggccagggcgtcttcttcatcatcgcagtaaacggtgatttgaaccgttttcccccctttgatttttgtaataacggcgttcggatttccggcgatgcgttcgctccaggcgtcttcccatttggcggcggaaagtttgttccaactccatgtcatgcagaaagtatgggatttttccggcagggaggcaagaatggattgattgtaactgcattcccgctgtttttggggctgtggggatttattgttgaggagccgatttatttaaagagaggggggcagatgttaaatcattttggtttcagcatggttgcggatttataatccgctagcacccaaccgcaatttagtgttttttattgtaaaatgattatggaaaaatcattgttttttattgataattacattttttgttggggccgcttccacctccaccgtattgtgtactggcggcgcaggaactgaaaattggacggacgcggccaactgggataccaataccgttctgagcaatggtgataacatgaacatcagccgaggatttcggtaaataccatcttggatctgatgagaaaggcgtatatatccaatatgtagcctccgtgccggagccagctgcggctttactgagtcttttgaggctggctactttgatgatgcgtcgccgccggttggcctgattgtgataaaaatcatacattatttttaatccgccgcttttctgcctgcattttctgtcaggaaagcggcgtttttttattttgcccccgcttccctcatcttggcttctcttttttggggagagatttttattgtgtggattcgctctgttgagccctccctaagtcccgcagcaaaaaggaagggtgcgacggaattcctgccctgctccggggggtgaccattgtcttttcctgttatcagaggggatcaggagcaaaatccttcagaccagggttaagagttgtggcaccgtctgttagttacagggattttccgttcggccacatcagcatccgtttcaggaagcgttcgttgttgacggtgatcttcgggaagaggcgtttgctggattccttgagcgccctgatggcgtcttcaccctgcagcggcgtgcggccggattcgtcgatgatggtgcgcagccatgcggtctgtggcatgccgcatgcttccacggccttgaagggcatgcgttccctccagttggtccctcccgtagtgccgggaatattgagccgtttgttgatgccgaagagagcaggccagagaatggccgcataacgggaacgggaacggaacagagcgttgtacatggccgtcttgatttcctggttccagtaggaaagccaggtttcaggctgcatgccggagaaatccgcaaaccatttcagaaggcgcgctccgtcctccgcctggcgcacgatgttttcctgttccgggctggacggcgttttgggggagccgttctcccacaggcccagcttgcgggcgcgttcgattttcgcgtagctgtcgttccatgtctgcatgatggtttcgaaatcatgcgttccgaacgccgcaaaggagcattcgtgatattcttttccagacgtaatggttccgtccgccttgatttcccagtggggaattttgaaaccggggatatccagctgccgcatgttcgggcgcacgtagtccggaacgcagcccaggtcttcccccaccacgctgacgccgggggcggcggaaagcagaaggcgcaggtacaggtccccgtccgccaggttcatgttgcggtccgtagcattgtcatccccgcgcggtttgaagccgggcagccttccgcccgttctctgggcagcctgatcgggggaaagcggcaggaagaccccgttttccgtgggtttccacgggaaggagtaaatgcggtaaaaccccaggatgtggtcgatcctgtacatgctgaaaatcttggtgcagtattttacccggcggcgccaccaggcgaagttgtcctgcgccatgacatcccatctatacagcggaatgccccagttttgcccccatttggccgtgaatgggtcttccgcatagctgccttccgccggggctcctccgcaccattccgtgtcaaacaggtggcgctcaaaaaagacgtcggcgctggaaagggaaacgccaatggggatatcccccataagcttcacattgcgctcgtccgcataaatacggatgaattcccactgtttttcacagagccactggagccagcgggcaaaatccttttcttcctcgtaatcggcggcaatggccttggcccgcgccggatcctgttccggccagtgccaccagatttccgtgccgaacaggtcgcagagaatctggaaacagacaaagtcttccagccagctcccctgttctttcacccattccctgaatttgggcataatgcactcatattccggcttggttttgaaattgttccaggctccccgcagaatccacattttccagaatctgaccttggggtagtccaccagatccgggccggagggctgttcccacggcagcgtgtcccccgtttcattgaatacgcgttcttccaggccgggtatggtccagggttccagggaaaggtacaggggttccaaagccacagagctgatggcggaatagggggaggggcattcgtccctgcccagggcattgacggggagcaactggaggaaccccacatgggcatccgccgcccagtcaatccattggcgcaaggccgtcaggtccccgattccgtggtcattgttacggcgcagggagaacaatggcagaactacgcaagctaatcttttctcatccatatcagaacgcattacttgagcggttcccccggatggaactgcgtcagccgttggaacagtaagcgccagaatagcatttccggcaggaaggcggcaagcttaatacgttgtctccgcgccatgctttgcggtttttcctgggaagtggagcaggggggacggtaagacaggctgttttttcccgccgcaggaatagacgccttaccgggaatccgattatttgtccgggatgcagttcggaagcggcatggttttctctgcgggaaacagcatgaaccggagggaaaggcggaatttttcttttagaaacagccactggcggaaacaggcgcaaattctgcttccatccgtaatccccggcaattaagataatctgcaaatgaaattgctttttctcccttccgctctgctggtgctgctggcctcctgcggtccgaacaagcatgtgaatgcctgggaccgccagagttctgcgttggatcccgtgggaatcacttccaagaaaatggcggctaaaaacaaggcggagcaggcattttacaagcctggggaagccgttacgttcaagaaggacagaatgatggtgtttgaacagaatccggaaagtaatttttccacaagcggaaccgtcaggggtggggtgaaaaccgggaaggtgctggtctgcggggacttgttcgccaaagtcgaatttgaagacggcagccagggttacgtaagcctctcggaaattgttaatccgcaggaaatgatgggtttttatcctgtttccgcttctgatctaattggtccggacggagctttgcttcctttgccctcaaacatgggcgccgtcagcccggaagccgccgcttcccgtgagctggatatatcccggatgaatacctctctggttcctgttccgaattccgtttctccgtcgggagctgcgcctcaggaagctcctccggaaaacgttcccctgcctgaatccagcgtgaagcagtagggcctttgcagaaaatccggaaagccgggcggaaaataggagacaatatacgtcggcctgcgcttcgcctgtatttttgttcccgggttctttccgacaggcacggaagcaattttattccgccgtcaattcatacgcaacggcatccgttacggtgacagtggcgaattgcccgacgggcagcgtcagaggaacggaaacggttccgtcaatgtccggagcatcccattccgttctggcgactccgggagcatccaccagcacgcgtatttgcctgccgatttgctcctggcccgtttccgaagcgagacgcgccagcaacagggtggcttcattgtagcggcgagccttggtgcggtggtgcacctgattgggcatcttgtaggcttttgtcccttcctcccgtgagaaggtgaaaatgccggcgcgttcaaaacggaattcctcgataaactccatcagttcctgatggtcgtcttccgtttctccggggaatccggtgatgaaggtggtgcggatggcgatgcccggaacggccttccggatattccggagcaacgtgcggatatagtctccgtccgttacgcgctgcatggcgtccagcatattatcggaaatatgctggaggggaatgtctacatagcgggccactttggggcattccgcgatggctgcggtcagttcgtcgctccagtgggcggggtgggtgtagagcagcctgatccagaattctccctcaatggcgttcagagcgcggagcagggaagccagggattctccgcgggaggaatccaccgcgctgcggcggtttgggcgcgcatccgtccatttatccatgccgtaataggtgatgtcctgcgcgatgaggcagatttccttcacgccggaccggataagggtttccgcttcacgcactacgtcctgctgggaacggctgcggtggcgtccgcggatcatgggaatgatgcagtaggcgcagccgtggttgcagccttccgctatcttgatgtaggccgtgtgcggcggggtaaggcggtagcgcggcgtgttccagtcaggaacgtacctgcattttccttcaatgaagttccggtcctgtatggtccggtccatcacttgagtgatgatttccggcagtttggtgatttggtccggaccgataaaggcgtccacctccggaagcagggcgggcagttccttccggaagcgctgggacaggcagcccgccacgatgagtttctggttttccggataagccccgttttcccgggcacgcacgatgtccagaatggcatcgatggcttcctgcttggcctggtcaatgaaagcgcaggtattgaccaccattacgtccgcgagttccggttccggagtcatggtcatgccggctttttgcaggtggccgatcatgatttcagagtcaaccagattcttggggcagcccagggaaatgagtccaacggtgagaagcatggcagtagataagaagcgtgatggcgtcaatccccggagggggagtcgtccttgacgacgacgaggtcgaatggccggatgtccacgacgcgcacaggggtacccttaatcagtatgccttgtcgagagaaaacctcgcatatttcgccatgaatcatggcttttccattgggtttcagctccgtgacggcgttcccgcggtctcctacctgaacgcgcgcgatattgaccgcttccccggcggaacctccgctgaccgtggcgttggtaacgcggcgcatcaggatggaatccgggaggtatttcatcagcagggcaatcagaagggagcctccggtcaggcccagggccagtttcaggagggggatgcccaggactgccgccagcgtgttgacgtcatcccactgtccgtcccggatgatatggtcccattcccaggagctgaccatgccgctgaacagggccagaaagatgcagacgccgcccgcaatggccgcaatgaatgtgcccgggataacgaagaattccacgcaaagaaggactatgcccagaacgagcagggccgccgtctcatagctagccagattcccggcaatgttgttgccgaagaagaacagggcaaacgcggcaatggccacaatgccgccgatgccgaatcccggcgttttaaatcccatgtaaatgccgccgatgcccagcaggatcaggatgggggaagcccatgcaatccagaggccgatgcgctcaaaggccgtaggttccgccgtgaccacgggggcatttactttctcctgggccagcaggtccgtgacggaggaggctgtgccctgggccagcaggggcctgccgtcttccagacgcgcggcggcttccttgcccgtcagggtcaggagcgcgcctttttccagtttgacggggccgaactgctgttcctggtcggacgggatcatcatggctttcaccacttccgggcggtaacccttttccgtcacgacggagcgggtaaaggcccagaaggcgctttccgctttcttgcgcatgacgggatccatttcctctccggatgaggtgatgatgcccgctgcgccgatggaggagacgggagccatatagattttgtcgcacgccgcggagatgagcgccccggcggacatggctctggggtttacgtaggcgtaggtgggaatggtgagcggctggatgcttttcatcatcatctcgctggtctcccaggccaggccgccgggcgtgttcaaatcgaatattaccgcgcgcgcctgctcctcctgcgctcttttcaggatgcggttcatgaagccgaagctttgtttgctggtcagggagtcctcccctacggggatgacgactaccctgtcgcggaaggtttcctccgcggccgcccggaagggggcgcgggcaaacagggccagcaaagccagcaacagaaggtgaatgcgcttcatacgaacaggctagcatgttccgctcccgcgctcaatggggaaatgtgttcctccggggcgagaagccgccggtgctgcgccgtctttcccctgtctgtggaggccttgtttcctcgcctggcgttccgattctgtattcttgtgcacccgtaccccttgtgatagactggttccgccttatgggaaggattgatgaagacagtatccggcgcgttctggaggccactgacattgtagatgtagtgggatcctatcttcccctgaaaagggccggttcccggtggaaggcatgttgcccgttccacaatgaaaagacgccttccttcattgtggaccagagtcggcagaattttaaatgctttggctgcggggaaggtgggtctgccatcacttttgtgatgaagatggagaacctggggtttgcggataccgtgcgaaggctggcggaaaaagccggaatctccattgtggaagaggtctatgacgcagcggaggaaaggcggcgcaaggcacgcacggctttgctggtggcccacaagaaggctgctgggtttttccacaggctcctgctttgttccccgaaggcggcggaggccagggcttacctgaattcccgcggatacggggcagacatggcgaaacgctggcaggtagggtgggctcctgactcctcgcgggagtttctggcctgggcccgcagggaggggatcccggaccaggtgctgatagattccggtctcgccaaccgcggagaacggggagatttgtacgcccgcttccgggacaggctgatgttccccatcaacaatgtgtacggagaatgtgtggcgttttccggccgcattctgcggccacaggaaaacgtaggcaagtacgttaattccccggagacggccattttcaaaaagggggacgtggtgtttgccctggacaaggcgcgcggccctatgggaaaaagcggcaaagccctgttgtgcgagggacagatagacgttattgcctgccacgaggcgggtatttcttttgccgtagcccctttggggacggcgtttactccggagcatgcccggattctttcacgctatgcttcacggatagtattgtgttttgacgcggacaaggcgggcatggctgcggcggaccgggctttccgtgaactggccccttttggcaaggatatttacctggtgaaccttcctgccggggacgatccggattctttcatgaagagggaggggaaagaggctttttctgggatggtggagcgggcccgttccttctttgaggttcgcattgaacgggccagggagagcggtttgttggatgatgccgcttccagcgccgcttttgcccgtgagatgacggccctgctggcctgcatgagcgatccggtggcccgggacctggctacggctgacgtagccacgcgcatgcgcatggctgcggataatttgcgcggcgccgtcagaatggccggacgccggaaggggcaggaacaggcccagtccgcagagcgtaagacggctgaggaggttccgcagcatcctcctgtgaaaatggatcgcgccgtggccgtgctctgtgaactggcccttcagaattcccgtgcccaggggcttatcgtggaccgcattgaagaattgctggagccgatgcggctgctgcagggcggaggcatcttaaaaaaaattctggccaggctgccttctccggacagccccgcggccgttcaggcttttctggtgtctctgcctcagccggaacgggatgccctgggcatgctgaatttggagcccatacctattcccgatgtggacaggagcgtacaggaagcctgctccggcattgcgaaggccgctttggagaggcacatcgcctccctgatggcggaactggcggatccctccacggatgctgccagaaggctggaattgtccaaacttagtgttgacttgaagcgtttgctgggtacaatgtagtgcctcgatacctccgggtattgatataatggtgaattgtgccctcttcttttcaagatatgtccaaatccggtgacccatccccctcttctcccaagaagacttccgccaacaaaaaagcttctgaatccaaggaaaaaatagcggcccggcccgccgcaaaaaatcccaaaaccgctccgaaggcggctcctgtcaaaaaaaactctgccaaggctgccgctccggctgcggaaaaggccgccgccaagcccgttgcagaaaaaaaggccccggcaaaaaaagcgtctccggcttctgcctccaagaaggcggcgccgtccgccaaaaagactccggcaaaggcgcctgaagctgtccctgccaagaaagctccagccaaggctgcggagaagaagccgactgagaagaaggctgccaaacctgccgcgaaggaggaaacgcccaaaaagttaagcgaaatactggaagaggaacgcaagagggctgccagccgcaagatcacgaatccgattgacgctccggaaattcaggaaaaaatccgtgaacttatcaagctcgccaaggaacaggggtatctgacttttgacgatattaatgactcccttcccaacgacattgtcgatcagcaggattacgaggccatcatggaccgcctgcgcagcatggcgtttgacatcattgacgcgtccgatgtggacagctacacggaccgcacccgcatcagcacggaagaagaggacgaagaggaaaagctcgaagccaagatggacattctggatgatcccgtccgcatgtacctgaaacaaatgggccaggtttccctgcttacccgtgaagaggaagtggccatttccaagagaattgaggacgcggaacagaacgtccagcgctgtgtgcaccgcttcggtttcatcgcgaatgcctatctggacgtagcctatcgcctgctcgacaatgaggaacgctttgaccgcgttatccttgacaaaaagatagactcccgtgagcgctatatgaaagggctggcccagctctgcgcccagatacagcagacccatcaggacgcatccggttccttccgcaagctgtaccgcagcaaggaggcggccaagtccgtcaaggcccgccaggccgaattcgacaaagttgcaagcgttttggtgaagttcttcggtcgcctgtatttcaagcacaaggtgattgaggatttctgttccatgattgacgaggcccgcgaccgcgtgctccgcatgcagaagaaggttgccctggaaccggacaacaaggaactcaaggaacatctggcagagctggagcttcgcatgtggatgactgcggatgagatgggagaagcctaccaggaactccgcaaatggcttcgcgaagcccgcagggccaaggatgaaatggtggaggccaatctgcgcctggtcatttccattgccaaaaaatataccaaccgcggcctctccttcctggatctgattcaggaaggcaacatgggcctgatgaaagcggtggaaaaatttgaataccgccgcggctacaaattctccacctatgccacctggtggattcgccaggccatcacccgctccattgcagaccaggcccgcaccatccgcattcccgtgcacatgattgaaaccatcaataaattgatgcgcgtgcaaaagcagctggtgcaggagtatggtagggaacccactccggaagaaatcgcggaagaaatccatctgcctgtggaacgcgtgcgttccgttttgaaaatggcccagcagcccatttccctgcaagcccccgtgggggattccgacgatacctcctttggtgactttattgaagacaaggcggcggaaaatcccatggaggaagcctccttctctttcctgaaagaaaaaatcaaggatgttctggacaccctcacggatcgtgaacgcgaagttattgaacagcgcttcggcctccgggacggcagtccccgcactctggaggaggtgggccgccagttcagcgtcacccgcgaacgcattcgccagattgaagccaaagccctccgcaagctgcgccatcccacgcgcatcagcaagatcaagggattcctggaaatgacggaatcctgaccggatttgcgccgcatgccgtgctacgcttcgtggtcatgaagacttgcgtagctgcggtatgcggcatgttcatgttactggtttcctgttccggcagcagggaattcaaaccggcgttcaatcagccccttcagcccgtgatgcagccgggctttgtgtatgtggaccaggtggctccgctggtgaagactaatttgaaatatgccgggtatgacaattttgtagggcgtccgctggacggttaccacggtcggcgcgccatcctgcgcacccaggcggcgcaggcgttgaaaaaagtctcggaagatttgtatcgtcagggttacctgctggaaatttatgacgcctaccgtccccataccgccgtgctggacatttgcaaatggggagctgacgacggggatcaaaagatgaagtcccggtattatccccatattgacaaggccaaggtgttcggagaccactatgtgcgcgatttttcggaacattcccggggcgtggctgtggatgtttccctgctgtacgccaagaccggaaagccggtggatatgggcggccatcatgacctgctggatcccagttccaccacagactccacattagtgactccgtcccaacgcagaaacaggatgattctgaaaacggcttttgaaaaacagggttttgccaattatgctccggaatggtggcactatcgcctgttgaatgagcctgaacctaccctgcattattactttcccgtgtgggacggcatgacttccgcgggcaggccataaaagaattttacatatcaaattttgtaaaaatttgtttgttagctgagtggtcggctccgtgctgattcctatcaagcagaatgtagaagatcgtactgacacctggaaaggatacattagagtagaaaaagcagaacggcgttatttcctcatcgacggagacgatgttatgactctccaatggcgcgagtcatctatgcggaagccgatacgaagggtgccgagataaggacgagtgcattggtgatgttgaatcgtcccggcagcacgaaagggaatgcttatcgaaatcccttgttgagtatattgacggaatttggcgaaatcaaagacggtaagaatcctgattgggcctccgtaataaatcagcaatatgccaaggttgaagtggatgagtacagggatattgacaggctgagctgtgaaaaactggaagaagccagaaaggctctccttgaggttctgagcggtggcgtgactgttccttatgatgaatttagaacggcaggcactactcccacgcctcatgtcactattggcggaactgactttttgactgaaaagcagtatcggaactgtattgtcaaaccagacggatgcgatagtttgtctgtctggcccggtggacctttggatagataaatcattctgaagcatcatcaggcgatcaggtgattgagacttgagccgtctttttgacgaagtaatatctggaggatgaatgactctcttaaaacgcttcttttctcttgccgcacggttccccttgttatggcttctgacgtgccttctccccttgtcgatcatcctccggtggatgttgccgccttgcgttttcacaagcaggagatgacttttctggaaaactgtttccgggagaatccggataacaaagtaatttggcaggcggaccatgaagccgcattagtgtggagaacgccgaggggagccaattttaacagttatgaatttaaggcttttctgcgccagcaggacggttcattcatggaaatggggaggtattccgtcatgtctagctatggatattgggatgaaaaaaatatccaattctccgataaaggatttcaggttgttttaattgcggatggaggagcaacgcatgcaagtcatcagttctattattcccaatctgccgctacctttgttttccggttgggccgggaagagggcaaatgttccaacgaggaagtgtggatggacaatggcagttgatttccaaaccggtttgtctgcaatataggaggggaaaagtgcagtttggatgaaccccggccattccttgacgaagaggtttttttgttgcgggcgtcttggccgcgcgtatcgggggccgtaaatacggacttttgatgaaaaggccgttccgcggtaaaggcggaacggcctgaaaagcgtttatacgcaggagatgttaatgaggcaggcggaagttgcggttaaacgcggaaacttcttccttaagctgggagaagccttccggattcgggcatacctggtcacctacgtacaaggccagcgcacgcgcaatgaattcagccacctgttccacgtctttttccttcatgccgcgagtggttacggcaggcgtaccgatgcggatgccggaaggtttcatgggagaacccgtgtcaaacgggatggcgttcttgtttacggtgatgcctacgcggtccagggcttcctgcgcgtctgcaccgttaatgcctttgttgcggaggtctaccatgaatacgtggttgtccgtaccgttggagacgacgcggaagccgagttccgccattttggccgccatggccttggcgtttttgacaacctgggccgcatagtccttgaattcgggcttcagagcttctccgaaacaggccgccttggcggcaatgatgtgcatgagggggccgccctgcattccggggaagacggctgcatccagttttttggcgtattcctccttgcagatgacgaagccgccgcgggggccgcgcagggatttatgcgtggtggaggagacgaagtccgcatggggaaccggattcgggtgctgccccccggccaccaggcccgcgatgtgggccatgtccacgaacaggtaggcaccgcaggccctggcaatctggcccatgcgttcaaagtcgattgtgcgtgagtaggcgcttgctcccgccgtgatcatttgcggctttacctccagagccagtttttccaaagcatcatagtcaatagcttccgtttcctgggatacgccgtagtgaaccacattgtacagtttgccggagaagttggcccggtgtccgtgggtgaggtggccgccgtgggagagatccatcgtgagaatggtgtcgcccggcttcagaacagagaagtaaacggccatgttggcctgggaaccggagtggggctgcacgttggcatgatccccgccgaaaattttcagcacgcggtcaatggcgagctgttccactttgtccaccacctcgcaaccgccataccagcgcttgccgggatagccttccgcgtatttgttggtcagcagggagccctgggcttcccggacggagggagaggtgaaattttcggaggcaatcagctcaatgttgttgctttcccggcgtccttcctcctggatgaggcccgccagttccgggtccgtccattgcagggggctaccggaggatttaacgacgcggcgttcatggcgtccaccttcaaagtcagcatgcagccaggcgtccaggacgtcttccacactttcattgtccacataggcggaagccaggcagagcaggttggaatcattgtgctggcgggaaagggccgcagcaggggccgtgcggcagagggcggcgcggacgcccacccagcggttggcggcaatgctcatgccgatgccggaccggcagataaggatgccgcggtcgttggtgccgtcagcaatgctgcttgcgactgcattggcgtagtcggaataatcacaggaatttttggtcatggttcccatgtcggtaacttcatgaccccatgccttgaggagttctgctacggtttccttgagatcgactccggcgtgatccgcgccgatggcaattttgtatgtcgtattcatggtggtgctcattgctgacgggcaaaaatactgccttatttccctccggctggcaagccccggattcatttcgggctgttcgggaggcacggctcccggaattgcctcgggcaaaagaaccccggtcccctgaatggggccggggcggcaaggaggttcgcgaggagcgagccgttattttccggaggattccagcttcagcatatcctggacgatgttgatgccttcgcggagttccggatcaaggccggaggggtattccggggagtcgtccagttctgccgtggggtcttccgccaggtgcatgaattgttcattgtctttttccggatccgccaggggcagctccttggcgttgacgtcatccagcgtcaggcggtaaattttgtatttggtagcgtcttccttggccatttccgcgaagcggattttacgttccttgttgatggatttgcggcgttcttccagggcggagttttcctgttcccggattttcttgttcagggaaagcttgttgtccttgatgcgctgtttcatcatggcgatatcttccctggcaatctggaggtcgcggtctttttccacgcgcttcgcgctggcatctttcagcacgggcagcatggccgcgatggaggagtcctttttgtagttggtgcagggcgtaatctggtcatagggcatcgcgtagtccagaatgtcttctcccagttcgaatgccgccgtagcggtgggaagctggatatcgctttccacgcctttgagctgggtggagccgcccgccacacggtaaaatttctgggtagtgactttcagcaggcccgcacggtctctggccgcgaagaaaggcaggtattggccgatgtccacaggctgctgcacagaccccttcccgaaggtggattcatcccccacaatcacggcgcggccgtaatcctgaagggccgcggccagaatttcagaggcggatgcgctgagtttattaatgagcaccacaatggggccattgaagagtttctggcggttgtgggcggatttgatatccacgttgccgcgggtgtccttgatttgtaccacggggccgtttccggtaaagaagcccgtcatcaggcgcacttcctccagggaaccgccgccgttgctgcgcaggtcaattaccaggccatccacattttccttgttcatccgttccaggatttttttgacatccttggcacagcggcggtctccgccttccatgtctgcgtagaaggagggaaggctcagcacgccaatgcggttcctgccttccggagctccggtaagttcaatgatttcacctttggcaagttcatccttcagaggtaccttggagcgggtcagcgtaatgattttggcctgtccgggggcgtctgcaagctctactttcaggcgcatctgggtattttcggctccgcggatcatatccaccactttgtccagcttcatgaacaggatatccaccatttctccggagttgtcggagtcaatggcaacgatgcggtcgttcagcttcaattctccggatttgtcagccggtcctcccacaacgataccggtaattttggtggaaccgtcgtcttcactgcccaacagggcgccgatgccggtgagttccgtacccatggagattttgaaacggtccacctggcgcgcacccatataatccgtatgcgggtcatacgtcaaggctacggcgctgagcagtgtttccgctacgtcttccagatccgtttcctgaatattgcgttgaatgcgttcataacgcataagcagtttttcctccgcgggtttttcattggccaggggatcgggcttgttctgttccttggccaggcgcgctacggtttcacggcgcaggatttcggacaggagctgttcctccaccatgtctttccagacctgctgcatttccgcctcatccttgggccacgcggctgttttgcggcgggaacgttcgatagacttgtctttgtcaaaggtgaagcctccctttttcagcaaatcccgcgcataggagatgcgctgcatggcgcgctggcggtaaagggcgtgcatggcctgggccgcatccatcatctggccggacataaggtagtcgtccagctccttaccgtattttcttttgagggcgtctacgtcctgctgggtgaagaatattttgttggggtctaccttgcgcaggtaggtttccaggaatttagtggatagttcatcgctgaattctttgcgggagaagtggaaattctggagcagcagggacatttgcttgcccacctggttgaagtccgtagccgcagaggcgcaggaagtaatggcggctgcggccagggccgagaatgcggtgagtctaatccaacggaatgagtgcatgttcataacggaaaagggtgcgtttttttccatttggggaaaaagctggcgccgggatgtaagtgttactgatttgcaggtgattgtctatcttataaaacgtccacatgacgctattttgctctccttgtttccggaaggggacaagagtaaatggaagccggttcattcggaaatatccggcggcggcagggggaggaaagaagagaattcatgggtggataaatccaccataaagtttgaaattttgtgcggaagtccggcatttgtcatattggagctgcatggaaatggatttcattttacggatgtttttttcgcattttttccgctttttgttgttgcgtgctttctttggttttccgttgctgcatccttcccggagagggaaaagtggcgggatgactgctttcctgtttgcagcggggagggtgaggatggggagaacggacgttttccgaagagacgccgcaggaaaggaagcatttcaggattgaggttgcaacggttttctgtacacttcgcgtgatgatgagcataccgaatcgggacaagagtttttccggaagcaagatgggtgttctgctgcagcgttcattcagcaccgtggttttgcttgggttgctggccggggctttgtggtgggactgcgaacttgggtattacggtctggtctgcattttctgtattttggccgcctgggaatggcggcacatgctgctgcgttccggaaaagcctcccagccgaacttgagctttcttttcggagtggcgtaccccgtattgctgtcctggtcatgctgcatcactaaattccgggaaagcgctcttgcggaacaggtttctttccatcccccttcctcttctggtggcacttgccgctccggtcctcctggtagtggttgccttcatccgtgagatgaagtacccggtggatggaagcagggctctccgttccgtgggtactacgctgctttcctttatttatcccgtctggctgttctcttttgccattctggccctgcatctggcgtatatgagggcggggtatgtttatccggccattgtcatgtgtgtgctgtgggtcgttctggtaacgaagatggcggacatttttgcctacgtgagcgggttcctgctgggcggccgccttttttcccgcaggctcattccccacatcagccccaagaaaacgtgggagggcctcctcggttcctgggtgctgacgaatgcggcggccatagggctggttttcccgatgttcggaatttccgtcttgtccataacccaggtattggtactgatgggatgcacatccctcattttcctgctttccgtttacggggatctggccgggtccctggttaaacgcagcctggccatcaaggattccggttccctgctgccggggataggaggaatttttgatttgattgacagcccttcctttaccgtgccgtttttctggtttctgctggcctgcatcggctgaatgtccccggcacgaacggattccctgtaacccgttatggttttttcttctcttcccattgaggaaatccgcggagaattgatggaggctctgcgggttccttctctgcgcattttgttgaaagctcctaccggctccggcaagtccaccggcgttcctccgatgatggatgacgccggtctgggagaccgtggcctgattgtcgttgtacagccccggcggatggccgctcgcctgctggcgcggcatgtggcccggctgcgcggggtggagctgggaaaagaagtggggtatgcagtgcgttttgaacggtacatttcctcccgcacccgtatcgcgtacgtgacggacggcatgttggagcgctggctgacggaacggccctccctggaaggggtgagcgccgtggtgtttgatgagttccatgaacgcagcctttccggggatttatccctggggcgtgtgctggatctgcaggaagggccgcgccgggatctggccgtggtcgtgatgtccgccacactggagatatcagggctgcgggaatatatgggaggttcctgccgggttctggaagcgcaaggcaggcagtatcccgtggaagtcgtttaccgggctccccgcttggtcagtgacggacgcggcagggtggctcctccccccatatgggagcaggcggcggatgttgtgcgggaggcggtgagggaggatgactgcggggatgtgctggtatttatgccgggcgtgtatgagatacggaaaacggtggagttgctggcaggaaagccgtggatgagcggccgggacgtttttcccctttacgggtctctggcgccggagcagcagaattgcgccgtggagcggggggatatcccccgtgtcattgtttccactaatgtggcggaaacttccctgacgattgagggagtgcgtacggtggttgattccgggctggtccgccggtccggatgggatccgtaccgggggatggatacgctgcatctggtgaagatttccaaggcgtccgccgctcagcgcgcgggccgtgccgggcgcgtggctccggggcgctgtttccggctgtggagtgaggcggaacaggcccggaaggaggattttgacccgcccgaatgtttccgggtggatctggccggagccgttttgaatttggctgcctggggcgtcaccgtaccggaaaatttccgttggctggatgttcctgcccccctggtgatgcagcgggccgtgaatttgttggctgccctgggtgcgacggaagaggatggaagcctgacggatacgggaaaaaggatgaccgcttttcccctgccgccccggctggcccgtctgatggtggccggccaggatgaacagtgtgccgtggagctggccgccgttgcagccctgatgcagggagaaggtgttgcggtaaagggggggctgaacgatcatttgcgcgattctgcggattacacggatttccaggcggagtggcgcgcggtggagaaggctgtggatgccggttttggggcggcggcgtgtacccgctggggcatctcttcccgcggggcgcgggaggcatggatggcataccggcagcttctgtccgtcggcagccggggaaaagcccgggaaacgccgggaccggattttacggcggcgcgccctgccgtagtccgtgcaatgattgagagttttgcggaccatgtgggtgtgcgaaatggcgtggcagccaatacatgccgcatggccggcggggtgggcggcaggctggcggaaggaagcgtggtgtttcaaggagagcatttcgtagccgcagaggtggcggaattgtccggaaaggcggtggaaacccgtgtgggacgctgtacgcttattgcgccggaagatttgcgttccatttggccggagcgtttttcctgcggggaggaagccgtcttcgatgccgctttgcggcgcgtgcgtctgcaccggaagctgatgtatggagatctggtgctggaggatcgtgaccgcggggatgcccctccggagctggccgccccggttttggctgaaaaagtagtggacggaaccttgaagctggtgaaatggaatgatgccgtggaacagtggatacgccgtcttaatggtttgagcgtttggatgccggaactggagctgccccggttttcggaggaggacaagctggtcgccatttctttggtctgtgaaggggccgtgggttataaggacatcaaggaaagggaaattattcccgtgctgagggattggctttctggctggcaagcgaaggcgctggacgattatgccccggtaagcctcacgttgcccaacggccagcacgccaaggtcaggtacggggaggattcctccccggtgatcagtctgacggtgcagcgcctgttcggcgtggcggtttccccacgcattgccaacggggccgtacccgtgattgtggaggtgctggcccccagccagaggccgtggcaggtaacgggatctctggaaagtttttggcggaacggatacgggcaaatgaaaaaggacttggcggggcgttatccccggcaccgttggcccgaccccggggaactggatttccttccccgttcccggtgataaggagaaaggatttttctgtaacaaaacagtagcaaaatcgaccgtttccgtgtaaagaggcggtggtgcagctcgcggatgccctccgcccaccattcacaagagacagttatggactcaatttactggattatcatcacagccctgctgcttctggcggcatttgacttgatcaacggcgtagcgaatgacgctgtcaacttcctcaattccgccatcggttccaaggctgcacccgtgcgggtgatcctgaccgtagcttccatcggcgtgctggtgggggcctgtttctccggaggcatgatggaagtggcccgcaacggtatttttcacccggacatgttcagttatcatgaagtgatgctgcttttcctgggggtaatgatcagcgaagtgattctgctggataccttcaatactttcggattgcctacgtccaccaccgtttccctggtattcggtattttggggtctgccgtagcgacggccctgttcaagatttccaagctccgcctggttcagtccgtgtgggatttcattaatacggacaaggcttttgagattgtcaccagcattcttctttccgtagccatcgcctttacggtaggcaccatcgtcatgtggatttcccgtctggcgttcacgtttaaataccagtcccggttcaaatggttcggctgtttctggtgcggcattgccatgacggcgatagcctattttgccgttttcaagggcttgaaggagtctaccctgatggagccctcgttcatccaatacattgaccagaatctgggcatggccctgctcacggccttcggcggtttttccgtgctcatgttcctgcttcagcatttgttcatgacgaatattctgcgcctgaccgttctggcgggcactttttccctggccctggcttttgcgggcaacgacctggtgaattttatcggcgttttcatgggtggtctggattccttccagtacgccagcagcgtggcggcggccggtggctctccctcatccatcacctccatggagtgtctgatgccggggcagggcatgccggtaaaccattatattttgttcgccgcgggctgcatgatgatttttgccttgtggttctccaaaaaggcaaaaacggtgatcgccaccggcgtggaactttccaggcagggtgaaggcggtattgagcgtttcggctccgtcccccccgcccgcgctatcgttcgcagcgccatcgccttgggacgcggggtgaaaaggcttattccggcccgcatgctggtgcgcatgaaccaccagtgggatcccgccccccagcccttgaatcccaaggaccgggtggcatttgacctgattcgcgccacggtgaacctgacggttgcttccctgttgattgcatgggctactggcaggcagctccctctttccaccacgtacgtgacgttcatggtggcgatgggctcctccctggcggacaaggcatggggaagggagagcgcggtttaccgtgtaaccggcgtgctgacggtgatttccggctggttcatgaccgggctggctgcctttacgctggccgccgtcatggctaccatcctgcattacggacaggtgtacgccatcttcggtctgctggccctggtggttgtcattctggtaaagtccaccatcatgcaccgcaagcgggaaagcaagctttccgtagagcgttttgaccagattacggaagaaaatatcctggatgtatgcagccaccagattgtggacagcacgctcaagctgcgggaaatttacaatgacaccgtggaaaactttttccagggggacaggaaggccctgaaagaactggcggatgctgcagaacggctggccatgaccagcagcgaacatcacaagtacgatattctccctattctgtacaagatgcagtcccgctccctggatatgggctaccactttgtgcaggccctggagcatttgaatgaagctacgcagagcctgtcgcagttttccgagtccatcttcacgtatgtggataataaccacacgccgtttacgattgaccaggtggacgatttgaaggaggtgcataccgccctcatcaagctgctggatgaatattgcaaaatgctccagacggggacgtacattcagttcgactatacgatggtggcccaggaacagcttcttcaactggtggcaaaggccaccaagcgccagatcaagcgggcccagcgcaaccagacgcgtacccgttcctccctgctttatctgaacatgcttaatgaaatgaggtttatggccgtgcaggtgcgggccctgaccaatgacgaacgaaactttgtagcggcctgaagcggcggttctctgtttttttcacgtaaggaaaaaaattcttgagcgtttaattcgtgaaggtatcctgaatgaacagggatgttcgataagggaggaacgagagcttcccttgtcaccaggaataaccctgatttcataggtagttagttggagcggctacgggagaaattccgtagccgcttttttgtcttcccgggccttgtgtcatacaaaagaaataatgtttgaacatatttgccgtgtgtttgtctcacccataacggttatgatccggatgcagtgaaagagagagcgcttcatccacttaaggactcaaccgtcttcataggtagttagttgaacagcagccccggcgaagggattcgccggggtttgttcatttccggaagatgtattccgcgctgtaaacagctggaagggaggggaaaagaaaaaataggctgcgttttgccacggggtttgattgacgtgtgggacgcgtcagggcatagtggcagggtatgaagagagcgttttgcgtgatagccggtgcatgcagcctgcttggatgggctccggcggacgagacgggcatgaacaatgtgctggaggattggcggatgaggcagtccgactgggaatccgcattgaaaacggctgaaagcggggaaaaaagggcggaattaatgaaaaaccgtccggatgccgttccggtggctcgggaattatggaggctggtagggcgcgaccttcagaaacccgagactcaaaaatcctgccttcttccggctgtcgtctggtttctggatcatccccaggctgtagcgcaggcgttccccaatggagacatggctagaaaaattgtcgtgttctgcctggattccctggaaaatacgctgtttcgggaacagggggcgggaaaggcggcgtatgccctgagcaattcccgagacctgcgctgccgcgttattctggaacagatcaaggattacaaccagttccctgaggaccagggcctggcttccctgggcctggccatggtgatgaaggaaacgacagggatgcttcaggatgacgtcaggctggtggcggcccgcggaaaattgctgaaagacgccattatcaaatgctatgattccagtttcggccctattccggttcaaaatattgtgaaggaggaactgtatgaaatacgcaatctcaatatcgggcagaccgggcctgaaatcagccttccctctaccgcggcggccggaaaagtgacgctcccctccgggaataagcccgtgctggtggttttttgggatccgcaggatatgcgttccgttcagtttttgcaaaaggccgcgtctctccgaaaagaatttcccggtttgacggtgatgccggtggctcccggaaagagagagaacatagaaaaggccctgttgaacttgaaaatggatatgccctccctggtggatgaaaaagcggcggcgtttaaggattaccgggtgaggctcaccccgcgggtgtatctgctggaccctgcggggaaaatcctgatgcgcggcacgccggatatgctgtttgacgccaacctgtacgcggtcatgggcaaacttgagggaaaaaagaaagaaaagccggatgggaaaaagtctccctcctcccctgcttcctccaagcctgtttctccgccttccaggattaattccccggatacgcgcgttccctctgtttcccggcctgataggccgcggcccgcgttcccttccgccccctccggtgcggaggaccattctcttgccgctcctcctttgaggcccatgcctgaatgatccgtttcatggaggggattctgttgagaaaggccgcggagaacgtggcccgggttctttccggagcaggacacaccgtatattttgtgggcggctgtgttcgggacagattgctgggatattccgtgaaggatatcgatattgctacctccgcccgtccggatgaggtgttgcgcctgtttccggatgcctgggaagtgggcgccgccttcggcgtggtgctggtacgccgcgaaggtttttcctttgaggtggcgaccttccgcagagacggaagctacagggatggccggaggccggaggccgtctgcttcacggatgcggaagaagatgcccggcggcgtgattttaccatgaacggcctctttgaagatccgttttcttcgcctccgggccgtgtggtggattatgtaggcggagtggaggatatccgggcccgcgtattgaggtgcatcggggagccggaccgtcgttttgaagaagattccctgcggctgatgcgcgccgtacgttttgccgttaccagggaagttcaggtggagacggagacttgctcctccattttcaggaacgctccgctgctggcccggatttccccggaacgcatccgggaggaactggacaggattttattgtctcccggaaggaaacggggtgtggaaatgctggtggaaacggggttgatgaagcatgtcattccggaaatatacgatatgataggctgtacgcaacctccccaatggcatccggaaggagacgtatacacccatacgctgatgatgctggacgcgctgggaagggacggctcccccgtgtctttggagctggccctgggggttctgctgcatgacatcgggaaacctccctgccgtcaggtggatgaaacggggcgcatccgtttttccggtcatgacaaggaaggctcttccatggccagggtcattttaagaaggctgaaatattccaatgccgtggtggatgcggtgtgttccatggtggagcgccatatgcgcttcatcaacgtgaggcagatgaggaaatctacgctgcgaatgttcatgaacgctcctcatttccgggatgaactggaactccaccgcctggattgcctttcctccaacggactgatggacaactggcaatttgtcagggacttcatggattcctaccggaatgcccctctggttcctcctcctctggtgaccgggcgtgatctggtgaatctggggctgtccccggggcctgatttcgggaaatggctgtcccgtctgcaggaacttcagttggagggaacgctccggaccagggaggaagccctgctgcagctgggacaaattgccccggtggaacagaatgcgcttgcagaatacctgaaaaagttagcattataagcgtcaaaatttgattatttcaactcatgcgtcctgtcatttatcaactatttgttcgtcatttttccaatatggagacccatggagttgactgggggagccgggaaacgaacgggtgcggaacttttaatggagtgacggataaagccttacgtgaaatagcacggatgggtttcacacacatctggctgaccggggtgctgaggcacgctacgcagacgtcccatcccgggctggccgcccagccgaaatccatcgtaaaaggcctggcaggaagtccctatgccgtggtggattattttgacgtggatccggatctggcctcctccccggagaagagaatggatgagttcaaggctctggtaaagcgttgccggacggtggggctgctgccgatgatggattttattcccaaccatgtttcccgagcctacctggcggactgggacgggcatgacgattttggagaaggggatgatccccatacgtttttttctccggagcaggggtacttttacctgacctccaacagccctggggacggtccacccctgcgtctgccggacggcctgtttgaaggggaaatgacgttcggacgtgtgacgggcaacaatgccgttacatggaatcccggcaagtacgactggtatgaaacggtcaagctcaactacggctataactttatggccggtcttcctgccctccgcctgttgccggggtggaccagccccaagcagcatgtgcccaagacatggcgcatcatggacgatatcctttccttctggcaaagcctgggcatcggcggtttcaggtgcgacatggcccaaatgatccccatggctttctggaaatgggccatttcccgttcccgggtgcgtctgccggacgtgtttttcatggcggaggcatacaacgaccacatgaaaaccacacccggcgatccgtgcgccgcccttctggatgccggatttaatgccgtttacgattccgactgctatcatctggcgctccatatgtacacggaaaataactgggccaatgacttcgaccggcttttccgaagcaatcccatatacatgacccacggcgtccgctacgtggaaaaccatgatgaaactcgcgtgtgctcccctctttcctggggcggcgtggggcgcgttgttctgccggcggtcatgacgttggtgtatgcctccgggagcggtcccgtgctggtgtacaacgggcaggaagtgggggaacgggcggaggggcccggcggtttcggcggacatgacggacgtaccagtatttttgactatacctgcctcccccggctccagccctgggtggcgaatggccggtttgactcttccctgctgccggaagagtccgcagaactgagaaattttcatcggaagcttcttcctctgatgcagcatccggcgctggaccggggagatttttacggcctgaactgggctaatatgaaaaacaccactttcggcagggaaccggcggaagacacttccggccactgggtatatgccatgctccggcatgatgcccgcgccagggctaccgtgcttgtggtggggaacctttctccaaatatcaatttctacaacctgcgcatttccattccccagcacgctttcggctggtgcggcatccagacggatcgggtacgcgtcagaaacctgatggacgccgaggatgaggagaggatttttgagcggcgggaattgatggactgcggtctgtcccatcccctgaaaccgggacatgtgggcgtgctggaactgtctgccgtttaaagaaacgttccctccggagggaagctgcagcttttgccgatattttttactctgctgggcgtttttatgatgacgggcggtttttaattcggtatagtcccggaaattcctatgactagacgtttccctcactccatgtctgccattcagcaaattgccatggcgcttgccgttgccggtattggagctagccaggggctggcccaggagggggcaggggccgcacgccgggcagcagcccggatggaagagcaggctcaggcttccatgctgctgttggggcaggcgcgtcagcaatattccgagggcaagtaccaggaagctctggacaattaccgcagaagcctgactgcgctgcccaaatcccccaacatggagaagcgccgccgtttcctggaaaccagcatcgcggatgccagcgtggccgtggcccaggaatatatcagggcggggcgttatgatgaggccgtcaagttgctggaagatgccctgaaatccactccggaccatgccctggccaggcgcacgttggaaatagcccgcgacccggtgcgtacgaatccggcattgtctccggaacacgtaaaaaatgtagaggaagtcagccgtctgcttcacctggctttcggctattatgaactgggccagtatgatgcggccctgaaggaatttacgtccgtccttaagacggacccttacaatacggcggcgcggcgcggcatggaactggttaaccgcgccagaaccgcctattttagcgctgccagggatgaaacccgcagcagtgccctggcggatgtttccagacagtgggagatgcccgttcctttgacggaaacaccggaagaacccgcttcattttcccgtcccctagataacccggtggtgaatgtggaccagaaactgggcatgatccgtctgccccgtgtgcagctggatggagcgacggtgcaggaagccgtggactatctgcgcagccaggccaggacgcatgatgccacggctatgactgcggcggaacgcggcgtgaatatttccgtggatcccggtcctgcagacagcgtttccgccagggacgccgccgccaagagaattacgcttaatcttcagaatgtacctcttcgtgaggccctggaatacgtggcgcgcgcatccggccttattctgcggacaaatgcctttggtgcggaactggtatccagttcagacggaacttcctacatggtcaccaagtccattacccttccgccgggcttcttttccggattgtcggaggactccagcgccgaaaattcagaccccttcagttccggtgattccggttcttccggcatgaccctgaaacgggtggatccgcaaaaggcgctggcttccatgggggtgaaattcccggaaggcagtttcattaaatacaactcgggcaactccactcttcttttccatggcacgcccagagatttgagcatgctggaggagctggtagcggccaggactgcggaacagcccctccaggtggtggtcagcgcgacctttctggaagtcaatcagacggacttggaggaattgggctttaactggatcgtcaatctgaacctggaccctaccaagtggttcatgggcggcgcgggaaccgataaaaatgactataacaattccgtgctggacagcgccgccaatgtggccggggccgtcgctcccgcaggagtggtgggcggcctgcgttccggcaaccaggtttttacggaagatagcattgacagcatgatagaacgcggcacttccgccagaagttctgatgcgacctatgttcccggcggtgctcccagcatcgtcactctgcgcggcatgtggagtcacgcggatatcacgatgattatgcgcggcctgagccagaaaaaaggcacagacattatgcagcatccttccgtgattgtgcgccccggtgaaaaagccacctttttcagcggcagggaactgatttaccctacggaatatgatccgcctgaagttcccaacagcacgggcaataataatgactggggcgacaatgacaataacggcggcggtattccggtcatgcccatgactcccgcccatcccactgcctttgaaaccaggcagctcggcacgatcttcaatgtggaagtgaccggcatcagcgatgacaaatccatcgtggaaatgaccgtagtgccggaaatcgtggattttgacggtttcatcaattacggtacgtcgcttttcgttcccatggtctcccaggaaaaggacgcaaaggaagatgtcgtcatggtgaaaacttcagacaacttcatccttcagcccgtgttttccacgcggcgcctgaccgctccggtgcgcatagccaccggcaatacgctcgtcatcggcgccttgaaaaaatccacttccattacgtatgaggataaaattcccgttctgggggatattccctgggtggggcgccttttccgttccaaggggtccaaggaacagcgcaaggccatcatcatcatggtaaaggcggaagtggtggatccgggcggcaaaaagctttatacgccggatacttccattccggacgaggaggtcccggcaggggacgcttctctccccgccctcagcaatgcccagtaacctttaaccggatcaagaccattgaaaaacagcggttccgattttgagtcttctccttcccagggggctgataatatcatgcgtcagctgcatgcgtcggattcccacggagtagaacggagaagggaagtagtagtgcgcccggacggcagcaaggtgatccgggtggaaaagcgtaagcggacttacagtgacgaccagcgggacgccaaacaggccatgttgaaaaacaagcgttttttaataggcctttgcattctggttctgctggctgccggtgcgctggcggggacgtatatgtaccgccttacttctttcaatacggaggaatttgccggccgtctgcaagctgatctttccgccgcctggggcggagatgtgaaaatttccggaatggcggtggatggccttaccatgaaggcttcacgcatcagggtatcctttccggaagattcctgcctgtcctttgtggcgatggaaggcatctccggggaaatttccgccgtgcccttattcatggggaaaatcaagggggaaagccttaatgtgtccagggcggtagttggtttgcggcccggattcgttaaatttgccgtaccgcagacgaaacgggaattgccgttcgttttccggcgatacacagcgccacgtctggaagtggggtatgcccatgggacggaagaatttactctggagaggaatggcgctcccttttatatgacggcggaagcctacatccgcacgtccgggaacggacctgaaccggaatacgtgctggatctgtcacagcaaaaattgaaaatcaagggctggccgctgatgggggttgattccggttccgtcattctaaacgggagcggcgtcaagcagctcactttttccggttttctggacaaagggcgcctgctcaataagcctacggatctcagccccttcatgattacggggaattttcttctgggtacggatttccgtcaccaggcgtggactttgacaggaaaaaatttcgatctcgcttccctgctgggagatgatttctcttcccttctcaaggtgcagacgggagaacaggaaggggatgaaaagcatgaattgaagctggattttgctttacctgtaacaactgaacagaagaggccctccctaaaaggatacagtggttccgttatcaaggcgaccatgatcaggctgcctgttttgcgcctgctggcggccatgactgcccggaatacggaaataaggctgccgtactcttctcccgtctttacgtccggttctttcctgctggaaagcgatggaacgggccgttccgcctccctgaaggaaatttccctgtttgaacagagctttctgggagtgaccgggggggtgtacagcaacggtacttccttgacggggaagctggtttttaaaattccttcctacatggtggacagccggaaactgccttccggcgtgacgcaggaagggcatgaaattattcttcctgtgaaaatttccggtactccggagtctccacaggacaactctaccggaatgttccaggaagaggcgccgcgcacgggccgcccggaaatgcataccgctccttcccgtggaatagctcttccagctccgtcaaattcctcttctccccgtattacggtagacggattcatgtgatattgccaagactccatgctgctgctcaatcctattattcggaaaacatctgaaaagcgttcccgctggtggaccaggctggccggatttggcctgtggtccgtactccagcccatttgcatgagcctgaatatccgttccatcaaggaggagcatgatgatgtttatacggcgccttttctggtagccctttggcacaaccgcacgatggttccgggttatgcgtggtccctggcccagaagccgctcaagatgagtgtgcttaccagcgccagcaaggacggcgccctggtggaggccgtatgcaggcattttggcctgggtgccgtccggggatcttccggacggcggggggctctggcctacatggaaatgatgcgaaaggtccaggagggggacgtctgcttctgttttactccggatggtccgcgaggccctatttacgaagtgcaccacggtattgtcaaactggcctcccagtcagggctgcccatcgttcccgtatgcatcgaatatgaaagctgctggcgtttgaacaagacctgggaccgctatgccattcccaaaccgtgttccaacgtaaatattctatggaaaaagcgcctgttcattcctccggacgcgacggatgaacaggtggcggattatgcccgtcttctggccgggctgcttggcgaggggcttccggacttcccgcctcttaaccaatcattattatgcaaatcatcgatggaaaacaagtagcttcccaggtgctggaagaggttgaaagggatattgcccggctcagggaacagggaataacgcccggtttggccgtggttctggtaggggaagatcccgcttcccaggtatatgtaaattccaaggtgaaaaagtgtgcggagctggggatgaattcccgtaaaatagttctcccttccgacgcctcccaggaagaactgctccggattgtccgtgaattgaacgtggatccttccgtccacggcatactggtgcaaagcccgcctcctccccatatcgacgaggcggccgtggtcctggaaatagaccctgccaaggatgtggacggcttccatccggagaatgtcgccaagctggtgctggaagatgagaccggttttgtaccctgtacccctctgggctgtatgaggctgttaaaggccgccggcattgaaacggcgggagcgaatgccgtggtcattggccgcagcatgattgtgggcaaaccgatggcgcatcttttgatgtccaaacaggcaaacgctaccgtaaccgtggctcattcccgtacgaaaaacctgccggaactttgccgttccgctgatatcatcgtggcagccataggccggcccgcttttgtgacggctgattttgtaaaagacggcgccgtagtggtggatgtgggcatcaaccgcgtggaagatgcctccgccaagcgcggctatcggattgtgggagacgtagcctatgacgaggtggctcccaagtgccgggccattactcccgtgcccggcggcgtggggccgatgactatcgccatgttgatggctaatacggtcaaagcgtgccgccagcagacgggagcctgacgaaaatgccgtgacgtccgtttttcttgtcaaatgaaggaaagtaaggcagtattcagttaccattatgtcaagtaaattactcgaaggcaaagttggtgtcgtagtcggcgtagcgaacaagcgcagcatcgcgttcgcaattgccaaggcgtggcatgaagcgggcgcaaagctcatcttcaattatcagggagaacgtctcaaggacggagttctcaagctgatccatgagaacttcggcgaggatgttcccgtttatgatctggatgtcagcagtgatgaatctgttaacgctttctttgaaagggtccgccagcatacggataaagtagattgtctgctgcattccgtggcttttgccccgaaggaggctcttggcggcagtttcctggaaacgggccgcgaggcgttcaagatttccctggatatctccgcttattccctggtagctctttcccgcgccgtggaacccatgatgtccgacaacggcagcattttggcgatgtcctatctgggatccgaaaaagtggttcctaactacaatctgatgggagtttccaaagctgccctggaagcctgcacccgttatctggcttatgatttgggccgttcccgcggtatccgtgtcaattgcatcagtgcaggccccatgcagacgcttgctgctcgcggtgtttccggttttaacaccatgttcaaggtgtatgaggagcatgcccctctgggccgttcctgcacgggtgaggaattgggagccaccggcgttttcctggccagtgacggcgcagccgcaatcaccgggcaggtgatttacgtggacggcggttatcagatcatgggaatgtaacgcgttccttgcggaagctttcttcctgttcacaagccgtaccggtttttccggtacggcttgtttatggttttatggagaaggtaaggagggctgggggcttcctggcttctgtcggaaaggcctgtttccccgctgcgtttcaggggacgaacactttcagcgagccggggcgggtgatgcggaccggagcgtttcctgcataatcgccgtccagttcgcaggaggcctgtccggcggaggtgacggttccccccgtcatccggatgtattcaaaactgccgctcctccgggaatgaaagcccccttggactgcggccatcaggaattccccgatgatggaagtaatggaatgcctgaatactactgcgtccagaaggccgtcactgttgtccgcttcagcaaagaagttaagcggcccgccatacttgcgtccattgccgaagatgatggaacggccttccaatacccggccttcatctgtggtcagggtgaggtgcggctgtttttccgtacagacgcgggcgcaagcaattacataggcaagggctttccatttttttttcatttcccatgtggtcagttctacggctcgggcatccgcgccaatgcccgccatttggagaaaaacttgcccgttgaatgcgaacaggtccacatttttggaacgccccgtgttcagaatgtgcagggcatggtcgaaatccgggcggattcctatttcccgtgaaaaaacattcatggtacccgcagggaagggggccagcaccgtttccgtattgcagagagcccttgccgcgattcccagcgtgccgtccccgcctgccacagcaacggccggcgctccggaattagcctgagaaaccaaatggttcaacatgtcttccctgctttccggttcaatgacgtcaaaaaaatcccgatgccgatccagccagcggcggaatcgtccggctctggcgctgcgcgccgtgttattgaaaaacaggggaattttcatggagcggacacgaagaagttcaaaatctgaaccggggcttccgtgtgtgccacaggttcatggcgcacggttccgtcaggcagcttgaactccagcatgccgcgggaaatattgtccggcaggagtacctcaagaaacttcctcatgtcgtcggacggtccgggtgtaatgccttccgccagaactttcccttcttccgatttgaggacgacgtgcaaaggaagccttctggcaccgttttttctctcttccctgatgtccagcatcaggcggctgccgggcacatattccggttgggccgccacccattcattcgccagtttcatgtagcggtccgtgatattgacggcggggacggtacggctttccggagggaaagccagcgcgtgccgtttgtcgtcgtagcgggcttcccatatcataggaaaaaaggctcctgaaggttcttttttccaggaggtggcataaatggcgttctccggtttgcggggatccagcatgctgatggcggacatcacccacggggtgttgaagtccttttcattgtattccagcattttccattctccgtcacaccaggcttccacccagttgtggttgccgcgcacgtggttccaggtaagaacgcccgccatgcgggccggaatgcccacggagcgaagagcgcagattagcaggatgctttggcccgtacaggagaccttgccggattgcagggattccttgactccctggtggggaactcttctctccgtggaatagcgtacattcagggttttctggatccgggaggcgatggcgagggcggcttcccgccccgtcttgcatggggaaacaagcggtgcgaagaggtgatggaactgctccctccattcgtcgcgcggttcgttgaccacggcataagggagaacattattttcataaagttcccacggaacctgggcagcccaggggaattggctccgtgcagccagggcgaggcggacttcccggaccagcctttcttgcgtaaccgtccccctgtcctgcgcgggcatgtgggcacgcagaaactccaccccgtcctgaatggcgtcatgggcggcgcaaatagcggcggtcaggcccggaagaagggcgaaaggcagcagattcatgaacgttgaaattcatacctgaattccgggagggagacaagcttcctcttgcgcaagaagagtatggaaatgggcaaagagatgcgtgtcttccggcggagtgggggcaaagggtgcgtcgttatccagaatatcctcgcaaatgcgcatgaaatcgcgggcggttttcgcccttttcatgtaatggtcaaaagtgtcgggaagtccccgcgcggtataaaccaggtattttttcatgcggtggatgtgtttttcctccacataatgttcctgcatttcccgcgtgcgttcataaaggcggcgaatatagtgtagcacgttccggaaagtaaggtctgctgcaggatggccctgaaagcgggaatgaagctgtgaaaatatccagggattgcgcagggctgcccgtccaatcatcagcccagctggccgggccagccgcacccatgcctccgctgtggctgcatccacaatatttccgttggcgactactgggcatttcagcattcctgcggcccatttcacccattccgggtgtaccggggagcggtagccctcacggacggtgcgggcgtggatgcacaccctgtccggggaatgggaggcaattaccggaagaatccgttcaaactcgtccggcgtttcgtatcccaggcggcatttgacggtgaaggctccggggggcaatacgtcccggagcgctcccagggccgcgtccatggccttcagggaccgcagcatgcctccgcccgcatttctccggcatacgatgggagcggggcagcccatgttcagatccacgcctgcacaggcgtgttccatcaggacctgcgcatcccttgccaggtattccggttcatggcccacgagctgtccgtaaatggggcggcctgtaggattttcatcaatggagcgcagaatgtatggcgacatctttttatgatgggccaccgtccggaaatactccgtgatgaaataatccggcagggaattcaagtccttcaatgtgttgaggaaagccagatccgtcacatctttcatgggggccagggccaggagcatgggtctgtgcataccgtgaaaagctccggttggcaagctgtgattgtcttgacgaaagaaggaaagtgtggaagctgggagcatgaatcaggactcaacccgcaaagccagagtgaatgtgagacgggccgaagtaatggagcaggtggaaaaggaaatccagcagcattaccagagtgaattgatttcccacatccgttctgcgggcaatgtgtacaatctgggccatacggaattttttctcgcccgggagttcgggttctgcaacggcgtgcgccgtgctattgatatagcatatgcggcacgcagagtgtttcctgaccggcggatttttctgattggggacattattcacaatccggaagtgaaccgacagctggaggaaatgggcattcgaaaacttccctggaagcagttggattcctcctatgaccgggttgctccggacgatgtggtgattattcctgcgttcggtgttcccactcctttcatggatgcgctggaggagaagggcgtgcagattgtggatacgacatgcggggacgtgatgaaggtctggaaaagagtgaagaattacgccgccatggggattacctccattatccacggtaaggctacccatgaggaaaccagcgctacggcttcccgggctcttggggaacggggaagggggaaatacctggtggtttacgatttggaggatgcccgtatcctgtgcgactacatcatgggccgcggagaccgcgaggcattcctgaaacggtttgaaggatgctgttccccgggattcgatcccgaccgggatctggaggaggttggcatcgccaaccagaccaccatgttgaaaacggagacgcagacgcttcagaagatggtgaaggatgccattgttcagagggacggggacgatgataatttttatgtgtttgacaccatttgcggtgctacccaggatcgccaggatgccctgtatgaactgctgaaaaatcctctggacgtcatgtttgtggtgggtggctacaacagttccaacacaacgcatctggtggatattgccagggagcatgtgcccacgtatttcattgagtccgcagaatgcatcaagtccatccagtatgtggatgcttttgatacgaagacgcgggaagtgcgccgcatgactacggaaccggtagtgcagaacctgggcaaatccctgaaggtgggaattacggcgggcgcctcatgcccggccaacctgattgaggccaccatcctccgcattgcggatctgcgcaagtagcaaaacgcctccggtttggtgaatgagaaaaaagaagagttctctttcaacggcggcacggccgttttttccgtaacacggcgcagttgcctgggccgcggaagaaagcatagggaaaactgcgcgggagcgtttcctaaatttccaaatcttccggtgtaacggaacgttgttcccgggatgcaagcagtacagcttgttccacgacatattccgtattggagtcaaaacggtaggcgttgcagttgggacacactgccgtagtcagggatacgatggaaccgcaggcttcgcaaaccttgaagtccccgggacggtcaataatcagtttggctttatccaggcgggattgctgcatgggagtagaaaataaaacaagccgctcagcagaacagagcggcttgccataaagaatcgtcagaaaaccgaagtgaaaactcaggcgatttttgcgatggccttggcggccttgctcttgtagttggctgcacgattggcggggatggtgccaaccttggcggctttgtcaacggctgaggagaaagtgttgtaggcagcagcagcggcttccttgtcggacgtttccaccgcagcggcaactttcttgcggagggtcttcaacttggaggtcacggcgcggttgcgggcggtgcgggttgctgtctggcggatgcgcttgagtgcggatttggtattggccatgtttaaaaaaggttcggtttccgtttcgaggtggcaaaaacattagaataacaggacaaaatgtcaagctcttgatgtattttttaaggcattcctttcctgcacgggctgactgtgggctttaccggaaaaggagtttgtggcactatattctcccgttatgaagaaacgcgtggatttgcctgaaaaaagatatgaaggatatatttttgatttggacggcaccctggtggacagcatgccgctccattacagggcatggcgtgaagccctggctcgagcgggggctccggaccatgtgttccgggcggatgaattttattcctgcggcggaaaatccgccaatgatgtggtgcgttttttaaatgaacggtacggcatgcacatggatgcggagtccacagctgcggacaagcgccgcatttatttggaaatgctggaaaaggaaggcatgcagcctatccaggaagtggtggaattcgtgcattccctgggagacgcccccaaggcgatagctaccgggagcgccatgccgggagcgtcccggactctggctgctgccggactttcaggcctttttgatgtgattttgacgccggatgaggtggagcatggcaaacctgctccggacatgtttttgaaggcggcggaactcctgggggcatccccggaccgttgcgtggtttttgaggatgccgaacccggcatgaaagctgccgcggccgcaggaatggactgcgtacaggtccggcggccatccctggcctgattcctctttccggatttggtacggaaggggattccgggattttcctcctttctccatgcccttcttccttttaaggaaaaggcttcacattgcgcccggaatgcgttagaaccttttttcctattgaacaaataaaatattatttgcacatgagcacaaacgacaaaacatcatccgccccgacgaaaacccgcatgacaggagctgaagtgctcgtggaatgcctcgtgcgtgaaggtgtagacgtcgtctttgcctatcctggcggcgccagcatgccgattcatcaggccctgagccatcagcccaagatacggaccatcctgccccgccatgaacagggcggggcattcggcgcggaaggctatggccgcgttacgggcaaggtgggcgtttgcatttccacttccggccccggcgccaccaacatgattacctccattgcggatgcttatctggactccacgcctctggtggcgattacggctcaggtcatgcgctccttgattggacgcggcgccttccaggaaacagacgtattcggcatgaccgcccctatcgtgaagcacagctatctggtgacggaaccggaagaactgccccgtatcatcaaggaagccttctacatcgcctctacgggccgtccgggccctgtgctgattgacatgcccaaggacgtgcaggaggccgtgttcacaccggactttgacatggagatggatattcccggctacaaccccgtgctgcccgtccctgcggacaagctggaagaactcatcccgttgattgaaaacgccaggcggcctgtcatttacgccggcggcggcatcatttctgcggaagcttccggggatcttctggaatttgcggaacgttcccagattcctgtggcgaccaccctgatgggcattggcgccatgccggaaacccaccctctttccctgcgttggctgggcatgcacggagccgtgtttgcgaataacgccgtgaatgaagcggatctggttattgccctgggtgcccggtttgacgaccgcgtgacaggcgccgtcaatatgttctgtccggaatccacgatcgttcacattgacattgacgccagcgagatcaataaaaacaagaaggtggcgtatcccatccgcgcaaacgtgaaggacgccctccgggtgctcaactccgctctggccgcaaaaggctgggagcgcaaatcctccggctacacccgcactcctgaatggttcggcgtgattgacggctggaaaaaacagtaccccttctcctatgaggaccgcaaggggtatatcgccccgcaggctgtcgttgaggagctctaccgccagacggcggacaaggaccccatcatctgcacgggggtgggccaacatcagatgtttgccgctcaattcttcaaatttgacaagccccgccgtctggccacttccggcggtttgggaaccatgggctatggacttcccgcctccatgggagcgtgcctggcttatccggacagactggtcgtgaatattgacggggacggttccatgctcatgaatattcaggagctggcaaccattcatgtggagcgtctgcccgtcaaatgcattatcctgaacaaccagcacctgggcatggtggtccagtgggaagatttgaagtatgattccaaccgggcccagaccttcctggcggacccgcacgacaattatgatcctacccataaaacggaagatgtcatctacccgaactatccgcttatttgtgccggattcggcgtcaagtgcgagcgtgtgcttcgcatagaggagcttccggcggctatcactcggatgattgaatcccctgaggcctatgtcctggacgtcatggttccccatgatgtgcatgtgctgccgatgatcctggggggcatgagctacaaggatgtgattctggaacgtattgccggggatggttccgccaaaaaggcgtctgaactgggcaaggaaatcccgactgccctgtaagagcgaggcaagcttcttctattgagccttaaacaggagccgtccgtaagggcggctcttgttgcatggcagcgcaagaggaagacaggtcagttgactgccgttagggtggcagcaaggtatgtatatagatacggatagtcctgttttccggtaggtggattcctggttttgtgaaggaatgaggaagatgtttctggacgcagtaaaaaagaacggttatctagacaggaggctggaatagaaggaatggccgtggagagtgttcttaaggcgtgggtatttctcgtttaccatttttgaaaagcaaggtctgagtggcccggcagaaagacaggatgcctcatgcttcgcagtatttgaatcctgggcgggacagggtgccttggacagagggatgggaaacggtgaggaggagcgaagcccccatgctgcatgctggaaacgggaggcagggatattctttcggctggacaaacggagggacggaagacattctaggcgttccatggagggcatacgctattacaaccgctatacgggcagggaggaacgggagcaggtaccgggggagaagtatatgcaatggatttacggcactgcttcggggaaggcggcactgcatgtcctgattaaacgcggcgttttttcccgtttgctgggttggttgaagaatcgcccttccagcgcccgctccattccctcctttgtggaggagtacggcattaatatggaagattctctcaagggagtaggggagttcaggcatttcaacgattttttctaccgccgcctgaaaccgggagctcgccctttggccggcggggaggatacggccgtttttcctgcggatgcccggcacatgggttgggaacgcgccgaccgaattaaaaacgttttcgtgaaagggcagcgttttgacctgccttcccttctggggagcgacaccctggctgagcggtatgcgggtagcgccgtcgtcttgtcgcgcctgtgccctacggattaccaccggtttcattttccggtgtccggggtgcccgggccctggacgaagctgggaggcccgctggcaagcgtatctccgtattgcctgcgcggccgtctggcgtggctatggactaataaaaggaatttgaccctgatccggtcagagttgtggggagaggtcgccatgctggaggtgggagctaccggagttgggttgattgaagagacgtatgttccgggtgttttctccgcaagaggggcggagaaggggtattttgcctttggaggctccacggtaatgtgcttttttgaaccgggaagagtcagtttggcttccgatttgttggaaaagacggaagaaggcctggagctgtttgcccggcagggagacatgatgggcacggcagcgacatagcctccgggctggcgtgcctgtcctgcaatgttttgagtagggctctttcctggagcctgatgacggaatgccagggatggattccggcgtttcagggcggattttcggatttttgattttccgaagtgccaggcgggttatttcattttcgcaatggcgcgggccatatccggagccttgaaggtagaggagcctgccaccagcacatccgctccggccagagcgcattgagcggcattgttttggccaattcctccatccatttgaatgaggaaggaggcgcggttttccgtgcgccattcggcggctttttccaccttgtccaatacggaaggcatgaaggactggccgccgaagccaggcactacggacatgaccagcagcaggtctatttccgccaggtaaggttctacggcttcaaagggtgtggccgggttgagagccaggccgttttttactccggcttcccggattcgcccgagtgtgttgcgaatgtagtaggagtctcccagttccacgtgaaagcagatgaggttcacacctgccctgacgaagcggtcaaagtagtggtccggccgttctatcatcaggtgggcatccagaaagcggttcggccccaccgcttttctgacggcggcgcagatttccgggccaaaggagatgttgtccacaaagtggccgtccatgatgtccagatgcagccagtcggcaccggagtcaaaggctcgccgcgcttcctctccaatgcgggagaaatcagcggccagcagggacggggagattatggtcatggctgagggaggcttttcgggatgtcagttggctacaatgttgacgaggcggtcgggtacgacaattaccttgcgcacagtgacgccgtccaggaaggttttcaccttggcggaagccagggcctgtttttccagttcttcccgggagatgtccttgggcacttccagtttgtccctcagcttgccgttcacctggatgaccatgggaacggtattttcctccagcagggcttcctcccattcaggccagcttttctggcaaagctgcgtctgggccagagccgggaaggctgtttgcaggcggctgtgtatttcttccgtaaggtggggggcaaagggattcagcagggtcaggaaagcatcatagtcctgaacgtccaccacatccgcggaggtcatggcattggtgcattccatcattttcgcgatggcggtgttgaaggacatgccattgatgtcctccgtcacttttttaatggttttgtgcaattccttgcgtacggcaagcaccccggcttccggagcgttctccaccagtttggagttgatttcccattctccttcctgattttcccggaaggccacgcgccagacgcgggccaggaagcgggaaatgccttccacacctttggttgcccagggtttcacgtccttgagagggcccatgaacatttcatataaccgcagggagtccgcgccatattcgcggacgatgtcgtccggattgacgacgttgccgcgggatttggacattttctggccgtcttcccctaggatgagcccctggttgacgagtttctggaagggttcattggtgctgaggtagcccaggtcaaagagtaccttgtgccagaagcgggcatagagaaggtggagcacggcgtgttccgtgccgcccacgtacaggtccacgcctccgggggagccggcggagcccatccagtattgttccgcttcccggctgacgaagcgtttcgtgttggccggatccaggtaacgcaggtagtaccagcaggagcaagcccattggggcatggtgtttgtttcccggtgggctgtgggcgtgtaggctatccattccgcagccttgaccagcgggccgcgggggtctcccgtgggggcgaagtcgtccagatccggctggagtacggggagttcgctttccggcagggcgcggtggcgaccgtcttcccatacgatggggaatggttccccccagtaacgctggcgggagaagagccagtcgcgcagcttgtagtttattttgcggcgtcccttgccgttttcttccagccagaggatcattttttccttggcttccggagtaggcagcccggtcaggaagccggagttcacgctggaaccttcataaccgcagaagccgcgccagtccatgtcttcactgggcggctgaactacctggagaatgggcaggccgaagacctgggcaaaggcgaagtcgcgttcgtcatgggcggggacggccatgatggctccggttccgtagcccatcagcacatagtccgcgatccagacgggaatttgttttccattgaccggattgacggcataggctccggtgaagacccctgttttttccttggagaggtccgtgcgttccaggtcgcttttggaggcgcactgggcgcggtattgttccacagcatgtttctgttccggcgtggtgacggtatctaccagagggtgctccggggaaagaaccatgtaggtggctccaaagagggtgtccggcctggtggtgtaaacagtaatcgtttctccgtccaaggtgaaatccacttccgcaccttccgatttgcctatccagttgcgctgaagcagtttaatggattccggccagtccaggggctccagctcgtcaatgaggcgttccgcgtagtccgtgatgcgcagcatccactggcgcagggggcggcgttccacgcggtgtcccttggatttccattcctccacttcctcattggcaaggacggttcccaggtccggggaccagttgacggcagcttccgctacgtaggccagccggcgctggtcgatttcttcccggctcaatccctgttcctccagttcggaaacggggcgcgcctttttcagttccttgttgtagtaggagttgtaaagctggaggaatatccactgggtccaacggacgtattcatggtccgttgtggctatttcccggtcccagtcgtaagagaaccccagcattttgagctggcggcggaagttgtctatattccggaaggtagtgacggaggggtgctgtccggttttaatggcgtattgttccgccggaaggccgaaggagtcccaccccatgggatggagcacgttgaagccgttcatgcgtttgaaacgcgctacaatgtccgtggcggtgtacccttccggatggcccacatgcaggcccgccccgctggggtaggggaacatgtccagcacgtagtatttgggtttggacgcatcaaagccctcttctccggggttgtttactttaaaggttttcctctcgtcccagatctgttgccatttagattcaaaaacgtcaaagggatatggtttcttgcgctcggacatgacgggagggaatgtatactccgcccgcgggtcaatcaagcctaaacccggcggagtgcaggcgcttccaatgctcctggggcatgatgccgtttttcggaaaaaaggggaaaggtaagaagacgtttgcgcgtattttttaactgaaaggtttttgttgattgcaaccatgaagtttacttcctgtattatgtccgccgtctgcggagcattgttcctgtttgccggggcatccgctctgggcaatggttccaacactgtttccggaaagaagcccaatatcatcgttttcctggtagatgacatgggatggcaggatacttcccacccgttctggtccgacagccagggcaacccgaagaaaacctttttgaacaggcgctaccggacgccgaatatggagaagctggcttcccagggcatgacgtttacggatgcatatgcccatcccctttgcactccttcccgggtgagcctgatgtccggcatgaatccggcgcggcaccgcgtgacctgctgggtacgggaacagaacgggacgacggacgccaacagcaggagcctcctgcctccggactgggcgttgaacggccttcagcctataggcactcccgccaggggaacgacaaaacgccccatttccggggaggatatgcgctatcacatgacgcgtccttttgccacggcggctacactgccggagatgctgaagaagtgcggttatgttaccgtccattgcgggaaggcccatttcggcacgcagggaactccgggttccaatccgttgaatatgggatttgattataatatcgcaggtacggagatcggccatccggcggattaccgcggttccaggcattacggaaaggggtttaaccatgtgcgcggactggatgagaataattattaccaggacgatgtatttttgacggaggccctgacgcgggaggccattaaacgcctggaagccatcaggaccaatcccagggaggctggcaagcccttttatctgtacatggcccattacgctttgcattctccgctggatgagcgcgcttacgacaagaggtttgcggatgcctacaaaaacccggaggacggccacaagtggtcccggacggagaaacattattccgggctgatcgaggggatggacaaaagcctgggggatatcatgaagtatctcagggaacatcatctggaaaaaaataccgtactggtgtttatgtcggataacggaggcctggccatctccggcagactgggcaatgaagaggccaattaccctctttccttcggcaaggggtcatgcatggaaggcggtatccgggagcctatgattgtttcttggccgggcgtgacgaagggcggttcaaggtgtgccgttccggtggttattgacgattttttcccaactcttctggatatcgccggatgccggaacgtagaagttccgcagaagcttgacggcttaagcctggttcctttgctcaaaggcggccggtttcctgaagaccgcccccttttgttccaccagccgaataattggggggaaggcagtaagcaggcgcctcagtatacttcttccaccgcattgcgccagggggattggaaattgatttaccgccacctgacccagagctttgagctgtaccatttaaggaaagatatcggcgagaaggaaaacctggcttccagggagccgcggaaaaccagggaaatggctgttgtcatgggcaggttgctccgggagaggaaagcgcagatgccaacctataagaaggacaatgagctgggcgctcctgccgggagttccgttccgtggcccgaccaggtgaaggggaatggtttttgatgatccgcaataacgtttttccaaagttttttcataacccccggcaggattcacatcccgccgggcggaccgggtcgaggctggggtgccctcacttctttttccagtagttttttctgtccggtataggaatggtgtgtgttttcttttccggatgcaggatcatcgtttttcgtgaatgaaggcctcagcttttttcggagcaaggggaggaatgagcaagggaactggttcgggagggataaaaaacgccccgacggatatggcgtcggggcgtgacaagggttaaataacgaagtcccctgaaagggagggtttaaaaatcgtcggtgacagcggcatcatccgttgtcgtggtatcttcgctttcagcagcgctgtccgcagagggctcctcttccgttccggcagtatcgtcggcaggagtttcttccgtagcgcctggttcagaaacggacgttgctgcggatttggcagcgggcactgcggacggagcagctcccttgggcggaacaacgactttcatggccggaggggcgggaacgggagtttccagaccgtcagccttgcgggtgctgacgcggagtccgtcagcataagccaggtttttcaggatggcatagcccagggcgggagcccggtccgtcgtgttgaccagcatcttgaagtggttgttgacggacatcttgcgggcgtccttgccattgcggaagggaatgatgcctgtcatgttgccgtcattgtcaatgcagatcgcccagaaagagcggtctacctggatgaagtactgcgggcggatgtagtccatcgttttccattcagcgcccttgatgtattcctccatggcgcggcgcgcattggccagcatgctgccccagtcagcgtaaacccgggaggtcagcgtttcacggccattgtagccgtgcacggatacgtgctgggcagtagcaaattgacgggcatagctctcgggagaggcaggttggcaagagctggtgaagagcgctgctccggcggtcaggatgcaggctgctgcagtagtgaagggatgaatgttagtcatggcaatcgcaatggttacgttataaaagaggaaaatacatcccatttcaaggaaaagaatgcaggaggtaccgttttgtgccgttttttgacgtttccgtttgatgcggggggctggcgggagtggggaaggcgttctcatgcccgtctcgcaggtatgatggtaaattactaaaatttttctcgcaaatcgttctgaatcgcttaggttgtcgttgctttatgtccgcctttattatcagcctgcaggccctggaacgcaacgctcttatcctgagggatgtggcggatgccgcagggtgccgcatcgctctggcgctgaaggggttttcctgctggccctgttttgaggccctgtccccctggctggacggctgctgcgcttccggcctgtgggaggcgcggctggcccggcgcaggttcgggaagcatgtgctgacttattctcccggccatgccccggaggaaatagcggagctggcggagatttccagccatcttgattttaacagcctgacgcagtggagccgtttccgggaggaagtgatgcggcatccccgctttgtttccggtgaattgaaatgcggcttgcgcgtcaatccccaatgttccaccgggcatacgcccatatatgacccctgtgcccccggttcccgcctgggcgtgacgccggacatgatgcagggggcggacctgtccggcatttccggtcttcatttccatactttatgcgaacagggagcggatgacctggcggtaacgatggatgcggtggaacgccacttcggccatcttctgagccgcccggagatttcctggctgaatatgggaggaggtcattggattaccaaacccgactatgaccggaagctgctggcggcacttatccgccgcatccgcgaacgctacggcgtggaggtatggctggaaccgggagaggccgctgccattcataccggggtgctgcggtgccgggtgctggaccttttttccgcggagggggtgaatcatgccattctggatgtttccgcatccgcccacatgccggatacgctggaaatgccttatcggccggatgtgttccagattgcaggagacgcttccctccgttccgcgcagcagcccgccgtacggttggaaggggagagctatgcgctggcggggaaggccggggaaaaagcttatacgtaccggctgggcgcccccacgtgcctggcgggagaccggcttggagattattccttcgcggagcccctggcggtaggtgacgaacttgtgtttgacgatatggcgcattatacgatggtgaagactacgtttttcaatggcgtgcgccatccggacatcgccgttcagagaaaagacggttccgtggagacggtgcgccgtttttcctatgaagattttgaggcccgcctgggctagaatatttgaccagacagattgacatggcagcagctaaagaaggcatcaagcagaaagtccgcgggtggagtcaccatgattccgcagatttgtacggcattgacgattgggggaacggttatttccgcatcagcaaaaagggagaggttaccgtacgcctgaatgacgaggatggaggaaagaaggatgtcagcctgtgcgatttgctggaggggctgaaggagcgcgggactaccgttcccgttctgttccggttccgggatttgctgcgcagccgtattgcggagctgaacgacagtttccggaaagcaatcaaggaggcggggtaccagggtaagtaccagggcgtttaccccatcaaggtgaaccagcagcgccaggtggtggaggagattgcggagttcggcaccaagtatgattatggtctggaggccggttccaagccggagctgatagccgccatggcccatatgcacaatccgaatgcctatctgatttgcaacgggtacaaggatgacgagtttattgacctggcgttgacggcccagaagatggggctgaatatttttatcgtgctggaaatgccttccgagctggacgttattctggagcgcgccagaaggatggatatccgccctaatctgggcgtgcgcgtcaagctggcggccaaggggtccgggttatggcaggaatccgcgggggataagtccgttttcgggctgaacgcagcccaggtggtggatgtggtggataagctgaagcaggtggatgcgctggactgcctgaagctgctccattatcatcaggggtcccagattccaaatatttccgtggtgcgcgaggggctgacggaggcggtccgcatttacgtggacctggtgaaggagggcgcccctctgggcacgctggacatgggcggcggcctggccgtggattatgacggttccaagacgaatttccattcttcctgcaattattccattgcggagtttgcccgtgacgtggtggaggttgtgggagacatgtgttccaagtacggggttccccatcccacgctggtgacggagtccggacgggccgtagtggcctattattccgtgctggtgttcaacgtgctggatgtgacgagcgcgccgggcgaggaacctccgcccgagcttccggatgacgctccggagctgttgaaggcttttgcggacacggaccggacgctggccaggaagaatatgcaggagtgctataatgacgcctgctattaccgggatcagttgagagcccagtttttttacgggaacgccaccctgcggcagcgcgggctgggagaggcttattattggcatatcctgagccgcatttcccgcatgctggcggagatggagaccattccggaggatctcagggagctttcctgctccatggtggacttttattacggcaatttttcactgttccagtctcttccggattcctgggccatccgccagcttttccccgtgatgcctctgcaccgtttgaatgaacggcccacgaataaggccgtgctggcagacatcacgtgcgattgcgacggaaagatagatcatttcattgaccgtgaggacgtggcaaccgccctccccctgcatgccatcaaacccggcgaggacgattattacataggcgtattcctggtaggagcctatcaggagaccttgggggatttgcataacctgctgggagatacgaatgtggttggcgtgcatctggaaggcggccgccccgtttatacccatgaagtggagggcgatacggtgtccgatgtcctttcctacgtggagtatgatcccaaggagttgatcaacaagttccgcacgtttgcggagcaagccgtagccgaggggaagatatctccgtccgaacgccggagagccttggaagtgttccgttccggattgaatggatacacttattacgaactgtaggaaacggtcttgtcttttgcttcaacagggagcgtttgtcccgtgccggcgcgttttcctttgttgcggatcaggagaccggcggttctcccggcggtttcgtttcttcaatgaccttggctggcgtcagggcccagaagcgcgtggccgtttgcggagagatgcctttcatgttcaagtaccgtgtgcggagcagggaggaggagcggtgccccatttccatttgcaacaggttgtagtccttgaagtgcttggcgtggtagctggcgtaggtgtgccgcaggcagtccggcacccatgatttttttcttcctccccagcaggcttttttccggattttgcgccacttgattgtccaccctttcgggcagatgggagttccgggcccgggtttggtcctgtcacggcaaaatttgagccatttggcgagcacgggcaggatggtgacgtgcctggcgcctccagttttggtatgtttggagttcagaatgatacagccgtcgcggatagcgatgttttcccagagcaggcgttccacttcctgcgggcggattcctgcaaagatcatcagcgccgctccagctgcacagcttccgtcaaattcttccatggccgccttgagaagctgagttatttccttcagcgtcagagcggggatttcctgctcctgcagaaaaggcgtgtctacgcggaggatgggattctcgtcacaccatccgcgtttgacggagaacgagaaaattccgctcaagatgagcctcgctttgtgcctctgccgggatgtggtaaaggtattcatcaggatgttctggcattcctccacgctcaggctgcgcagggaggtgtgttccagttccggattgctttttttaagcttgtggatgatgctcctgatgtccgtcagcgtccggggacggcggtggcttttggaacgcaggcattccacggccgccgtgccgaaactgacggtttgatgtttgtttttaatggcgttcaatcccagggagacgacttccctgcaccgggtaatggtacagatttcatctccaagggcttccttgatttccaataccagccttgcagcctggatcagggtgactgattccccctccagaagtgcggctccgacatatttcaatttgtttgtattcggtgcttttttcatgttcatttctcgtgtttgtccaaacacggttttaatgaaaaaggctatccttataatggggaaaacttatgctttccactagaaaaagcgtaaccgtcaaggatatgttgttacttatgttttctttgaagcggccggaaaatcaaagtttctgatggtgcaggaaccgaaaatgttagaaagcgcggctccctgtgctgaatgtcaagatggacgtgacttgtccggcatgagtatatttctgttggaagaggggtaaaggaacggccggatgaaagtattttacatggctgaacgtatatgatatactgcttttctgtaccatgaacatcagaattcattctttcaacgtatcatgtgcaggcctttgctgcgtattggggtcttttttcgcggcggacgcccgtgagatttatcccctgaacggttcctgggatttcagttttaacgggaagcctgctgaaaaagtgacggtgccccatacatggaacgcagaggatgccgccaacggtgctcaggggaagcgggaagacgccaaatcagtcaacagtgacgcctaccgccgcggcccggccgtttattcgcgcacgcttccggtggagcccaggccgggcaagaggtattttatccgcggcgggggagccagcattgtttccgaggtttccgtcaatgggaagcccgcaagcagccatgagggggcgtttacggctttctgttatgaaataacgccccttttgaaaaaaggctccaatacgatttccgttctggtggacaacacgcagcgtaatcatatcgccccccagcgcggggatttttccatgttcggcgggctgtaccggcccattgaactgattgagacggacggtgtctgcattgatcctcttttttatgcttctcccggcgttttcatcaccacaaagtctttaagcaaatccaaggccgaggtggaagtgaagacccttctcaattcggacggaaaggccggggatgtggatgttgccgtggaaatcctggacatgaagggcaggaaggtagccgggaatacggtaaaggccgccgccggggaaaagaataggctggaggttcccgtaacgctggcaatcgccaatcccgtactctggaacggagtgaagaatccttacctgtaccaggtgaaaacttccatcaggacggcggatggccagacggatgagctggtgcagccgctgggactgaggacggtttccgtcaatcccaaggaaggttttgtcctgaacggaaagaccatgcagatcaagggggttagccgccatcaggatatgaaggggaaggggtgggccctttccccggaagatgaggcgcgggatatcaggctgattgcggatatgggggcggatggggttagaacgggccactatcccgcatccaccaatatttacgacctgtgcgacaaggcggggctgattgtctggtccgaggtccccaatgtcaacctggtgtgggatacgccggagttccgggagaataaccgcctccaggcccgggagatgattttccagcattggaatcatccctccatttgcatgtggggaattttcaatgaaatcggacaccagcccgaggctgccacgagaggagtggacatggaagctgagttgacggagttgaacaagtttgtgaaggagacggatccctcccgcatgaccgtgggggccagcaatcaggcgggccgcagaaaactgaacaatattcctgaccacatcgcattcaatacgtatcccggctggtacggaggagggcccgaaaccatgaagggcaacctgaacggctacatccgcgactatggcggcaagatgggcattgccgtcagtgagtatggtcacggcgccagcgcgggcatgcatgagaatccggccaaaaggccgtctcccaccggattctggcatccggaggaatggcagtcccatgcgcatgagatcaattacaggtgcatcagggaaaggccggaggtgtggggggcctttgtctggaacatgtttgacttcggttcctcttcccgttttgagggggaaagccccggcattaacgacaaggggctggtgacctatgaccgcaagacgcccaaggacgcctattttttctacagggccaactggagcccccgtcctaccgtatacatcacatcccgcaggtttgcggaacgtacggaaaaaacggtgcccgtgaaggtttacagcaatggttccgtggtgaagctgagcgtcaacgggaagcccgttgggagtgtcaaaccggatgatttgaagcgcgccgtctggccggaagtgactctcaagcccggcctcaacactattacggccacggcttccataggagggaaaacgtacacggattcctgcaagtggacgttgaaccctgccggaggtgacgggaagaaggattcagagcgttatcaggatccgtccctgaaaaagtataagtaagcaattccatattcattccgagatgaagacggttcgcgcgtttctgttttccgtgatgtgtctggctccggctcttcccctgctgggggacgttccggattgggaaaatgaagaggtgacgggaatcaataaggaggctccccgagcctccgtttttccagcatcagataaaacgttgagcttgaacggggattggaagttcaaattttccatgactccggacgagaggcctgccgatttcttcaatccctcttattccgtttccggatgggatacggtcaaggttccttccaactggcagctttacggttatggaacggccatttacacgaatgttccctatccattcaagccgaatcctcccaaggtaatgggggaaccgcccaagaactggccggcgtacagggagcgtaattccgtgggttcctaccgccgggatttcaatttgcccgcttcctggaagggagagcaggtgatgatccggtttgacggggtggagtccgccttttatgtgtgggtaaatggccgtcaagtcggctattccgaagattcctatacaggggcggagtttgaccttactccctatgtcagacccggcaggaatacgattgccgtggaagtataccgctggagcgacggttcttacctggaggaccaggatttcctgcgcctttccggcattttccgggacgtgaccctgtttgcccagccgcagacgcacgtgcgtgacctgttcctgaaggccggactggacagggaggattacacaaccggggtactggacggaacgttcaccatccgcaattccggtaaaaaggatattcccagcggcatgaagctggattattccatcgacgggatttccaccaaattgaactgggagggcaggaacggttccggccgcgtgcagacggacaacaggggaaggctggattccggaacgctggaggttccctccattccctccggaggcgaggtgcagatttccctgaacaggaaatttcccggtgtgaagccatggacggcggaaacgcccaacctgtacagggtgacttattctctgaatggaaaggatacccgttccgtcaatatcgggttccgttccgtggagattgcggataacggcgccgtgctgattaacggcagagccgtcaagttcaagggtgtcaaccgccatgaagcccatcccgattacgggcgcgccattccgcgggaagtgatggaaaaggacgtgcagattatcaaggcgcataatatcaataccgtccgttgttcccactatcccaatcatccttatttttatgagttgtgcgaccgctacggcctgtacgtgatggacgaagccaactgcgaagcccacggcatccgcaatagcagcatggatatttcccggaagccttcctggaagaaagcccatgtggagcgcaatatgagcatggtgcatcgttccaagaaccacccttccattgttttctggtccctgggcaatgagtccggaaacggccccaattttgaggcggcagcggcggctatcagggcttatgacactacgcggcccctccattactgcgaatttccgcacggccacaaggccgtggatatggattccgccatgtatccgcccgtggaccgggtggaaaactgggggaagcagaaaacttcccgcccctttttcgtgtgcgaatatgcccactccatggggaatgccctggggaatttcaaggagtacatggatgccttcgagtcttccccgcgcatggtgggcggggccatctgggatttcgtggaccagtccctccgcgccaatcctgccggaaacggcatttacaagcccgcccctttcaagggagtaacacaggcttacggcggcatgttcggagacaggcccaaccaggccaatttctgcgacaacggcattattcttggcaaccggaacaccacggccaagacgaaagaggtgaagaaagtataccagtacatggcttttgagcgcaaggacgggtccctgtccgttcgcaacaaatatttccataagcctttgaaaggttatacgctttatctggtatcccttgttcccggcggcggccatgccgtggagcgcatggttctgccggaggttccccccggcaaatccgcaacggttaatctgccttcagccgctatgcggaccggttccctgatggttctggcggatgcccggttcaagctcccggaagacgtgaaggaactttcctccaagcaactggaacatgtggtgaatgagtgcgaagcttacgagtggttcccggcatctgcagagaaggaggttcccgtgcctcccccggcggcgctgcctgctgtttccgtgcttcagggggattccgtggtcgtgcagggaaaaggtttttccgcctccttcaaaaacgggatgctttcctccctccggtatggcggccgggatttgattttgcccggctatccggtggagctccaggcgtaccgttctccggtggataacgatgcctggatcaggagcaaggttgaagggaaaatgaagatgcagaatatgaaagcggaatattccgacgttaaagctgccgtcatttcccccggcgtggcccgaatcacggcacagttccggacgaaaggttccgagcttgccttttccggggaagtcgcgtggacggttttcggcaacggcattatcaatgcttccgtccgaatgtatccctccgccaagggagaagaactcctccggctgggcgtcactttcgggatgcctgccgcgtatgaccgggtagagtacctggggctgggaccgtgggataattaccgggaccgccgcacgagctgctggaaggacattttccgcacttccgtggacgatatgttttttgcttattcccggccccaggatatgggcaaccgcatggaaacggactggatagccttgtccaaaccccaggaggaccaggctctgtgggtgggggccgcctctcccagggctccgctggaggtttccgttctgcgttatacgccgaaggagcttaacgatgccaggagcctggacaggctgccggagaaaaataaagtgattgtgaatctggacgctttccagatggggctgggcggctcttcctgcgggccccgtccgctggccaagtaccagacattgagcggggcaacagccctggggtttgtgctggctccctcgtccgccctgctgaatctggcgcgcacggggctggccgttccccattcccctgtcattgaacgggatggggacggcatggtcagtctgacttcctctacgcccgaggcggagataaagtattccgtcaacaaggggccggaaaaaacgtaccggaatcccttcaagcttcccgaaggggaagtgagggcctgggctgcctccatgaagtccggcaaggttccttccacgtcttccggagagaggaaattccccctcgtcaaggggcagggcgaatggaaaattctaagcgcttcctcggaagagccggataccggtttcgcccattttgccattgacgggaatccggatacctattggcatacgtcctatacgaacggcctgccggggttcccccactccattgccgtggatatgggaaccagaatgaagtttaccggatttatctacacgcccagaatggacaaggacaagggcctcatcagccagtacacgttttccgtttccgatgacggtcggaattggagggaagtgaaaaaaggccagttctcctaccactatatccggaaggatccggctgttcagcgcatcgacttcggcaggcctgtggaggcccgctacttcaagcttgacgcccggtctccggtgaggggcggggaacagagcgccaccgttgcggagctgaatatcattacccaataacggagcggcaggcgttttgcactgcttcccggatggagaaattttccagccgtgcgccctttccggggtgcacggcttgttgttgcgggcttttcagggtgcggaaatgtttttttaatgaaagaaagaacatggcggaatggtaacatacgcatgcgcaagatgatggcctgcatgctgggcgctgccctgtgtttttccatggccggagcggaaacaggcgtttcctctgcggaaaaagcttcacccctgttcgggaggatgatctggaatcgcggctgggagttccggcttgaggacgagcccggaaagagcggctggcagacggttcatctgccccatacgttcagtctgccctactttatgtccgattccttttacacggggttcggctcctaccgcaagaagcttgtcatgccggaggaatggcaggggaagaaggtgtttctggattgcggcgcagctttccaggtggcggaggtgaaggtgaatgggaagactgcgggaaggcatgaaggggggtatacggccttccggtcggatttgacgcctttcctgaagcccggcgagaactgggtggaggtacgggtggataaccgctggagcccccgcattgcgccgcgggcgggggagcatactttttccggaggactgtaccggaacgttcatctgcacgtgtgttctcccgtgtatttgcccgcgcacggagtatgggttcagacgccggaggtgacggcggcccgcgggaaggtccggattttgacggaagtgaagaatgataccgggacagtgaggaaagtgacggtgcggcatactgtgcgggaggagcaaagcggctgcgtggtgctgcggggagagaagggcgcggaactgggggccggggaagattctcgcgtacaggctgacctgcctcctctggcttctcccaggttgtggagccctgcggcccccaatatgtaccgtgtgacgacggaattgttggacgagaaggggaaggtgctggaccgggctgaaaatcccctgggtttccgtactctggagctgacggcggaccggggcatgctgattaacgggaaacctgtttatctgcagggggccaatgtgcaccaggaccacgccgggtggggggatgccgtgacggacgccggggcccgccgtgatgtacggctgatgaagaacgccgggtttaatttcatccgcggctcccattaccctcattcccaggcttttctggatgcttgcgaccgggagggcatgtgcatgctgaatgaaggcattttctggggaatgggcgggttcaaggagcatgacagatactggaattgcgatgcctatcctgcggaaaagaaggaccgtattgcgtttgaggaaagctgcatgcgccaggtgagggagatggtgcttcaattccgcaaccatccttccatcgtcatctggagcatcagcaatgaaccgttttttaccaggcatgcgccggaggccagggctttgtgcaacaggctcattaccttggtgaaggagttggacccgacgcgccccgtgtgcgccgggggcgggcagcgcggaaattttgacaagctgggggacatggccgcctttaacggggacggctcccatgtgaagacgcccggcaggcccagcatggtgacggagtatggttccgtgagctgccggaggccgggggagtatgcgcccggctggggggatatgaagaaggataaggaagcggggattcgctatccctggcgcgtgggagaggcagtctggtgcggttttgaccacggcagcatctggccttccggagggcgcatgggcatcgtggattacttccgcattcccaagcgggcctggtactggtacaggaatgcgttgaggaatattcctcctccggagtggcctgtggaggggactccggcacaggtgaaattgtctgcggacaagaaggttatcagcccggcggacggcacggacgacgtgcatgtgaccgtgaaagtggcggacgccgccggaaggcagatatccaatgccgtgccggtgacgcttacggtggtatcgggtcccggggagttccccaccggcaaaagcattacgttcacgcccggaacggatattgatttgattgacggctgtgcggcgattgagttccggtcttattatgccgggaagacagtgatcagggcgtcttctcccggattgaagggggatagcctccaaatcgtttgccggaatgctccggcttacgtagcgggcaggagcgcggaaacgcgggaaaggccctacaagcgttttagcgcaaaggagagggatatccagctggcgcggtacggacggcccgaatccggagagaaagccaatttggctgtattgaggccctgttccgcttcctccggatttcaggaggcgatgaaggcttccgacggtgacgatgtttctgcatggcatccgtccgtggaagacaaagcgccgtggtggcagctggacatggagtttgaattccgcctggaccgggtggaggtgaaggccgccggaagctggaaggggccggctccctcggttcaggtcagcagggacggaaatagctggaaggacattaaagccgttttgcgcaaggatgggacggagctgaccgcaatgtgtccggaagggaccggcgccaggtacgtacgcatccgcctgtctccggggcagggaattgcggaagtggccgtatggtcggcggatgcgttatgaggggtcccgtttttccggaacaggaggctttttcctgttactgcgcgtaccggagtttccggcctcctcttccgcccgctggcggcgcagtttgtcccaataggccaggcgtttgttgatttcccgttcaaaaccccgttccggcggcctgtagaactggcggcggggcatgttgtccggaaagtagttttgcccggagaaagcgtccggcgcgtcatgatcgtatgcgtaattctttccatagcccagttccttcattagtttggtgggcgcgttgaggatgtgtgccgggggcatcagggacccgtattcccgtgccgctttccgtgccgctccccacgcggtgtaggcgctgttggattttggggcgcagcccaggtagataatcagttcagcaatcgccagctctccttccggagagcccaggcgttcataggtgtcccacgcggcaatggccatttgaagtgcggcagggtccgccagactgatatcctccatggcgaaacgggtcaggcggcgcaggaggtagagagggtcctcccctccctcgagcatgcgtgcggcccagtacagggctgcgtccgtatccgaccctcgcagggatttatgcagggcgctgatgagattgtaatggccttcccggtccttgtcgtaaaccggggctcgctgctggacaattttcagcagtgcgtccgtgcccagcatttcatcgggcttgcagaggtcaaagacgctttccatcaggttaatgaggtagcggccgtctccgtctgccagttctatcagggtggcgcgcgcttccggcgcgagcggcagttcacgctgaagaagggtttccgcccgttcaatgatgctttccagagccggggcgtccagggagtgcatgacaaagactttgcagcgggagaggagggcgctgttcagttcaaaggaggggttttccgtagtggcccccaccagcgtaacggttccgttttccacatatggcagaaaaccgtcctgctgggcgcggttgaaccgatgtatttcatccacgaacaggagggttccatggccgtattccctgcgcctggccgcttcgtcaaaggcttttctcaaatccgccatgccggagaagacggcggagagagctgcgaaatgcatggacgtgcgcgtcgccagaatgcgcgccagcgtggttttcccgcagccgggcggtccccataggataaagctggtcatcttgccggagtccgccatgagccggagaggtcctccttcccccagcagatgatcctggcccatgatgtcttccagtgcggacggcctcaggcggtccgccagagggcggtccgccaaggcggagaacaggcccggggcgtcgtcttttttcatgatgcccatcatacgccgccggtaaaaggatggcaaggggagcctgctggcattttaggcggcccggcacgacggcacttcgtggagaggatgttgcaccccggttttgacgggtggaagagaagctggggagaaaaggaaagattcctgggaaaaaccgtgtatattgaacatgatgttcagacatgtttcccatgtgtttctttttctgttttccggcttatgcggcacggccgtgaatgctcaggatcagataataccccggcccgtgtccgtgaaggtggaggccaagggggcggcaacgcccgtgaagctggatgaaggaatgcgcattatatgcaaggagaaggacggggagttccggcgccaggctcacttgttgcagcagtttttgtcacgcggaaccggattggctctggacggggctggcggtacgggaataatccgcgttgtgaaggacgttgccctgaagcagtacgggccggaggcataccgtttggaagcggctcctggaaatatcgtcatcagcgccgcgactcccaaaggagtttattatgcggggcaaagtctggcgcagatgctgcctgccgcctttttcaacaatgatgcggacaaaaagagcgtaagttggaatgtagcggagaagcctttttccatattggattatccccgttttgcctggcgagccttcatgctggatgaagcacggcatttttttggagaggaggaggtgaagaggctgattgaccaaatggggctcctgaaaatgaatgtcctgcactggcatttgtcggatgatgccggatggcgcatccagattaaaaaatatcccaaactgacatccgtgggaggcaagaggagagatacggagatagagacgtggggaagcggcaagtatgaaggcaggccccatgaaggcttttatacgcaggaacaggtcaggcgcattgtccggtatgcggccgacaggaatataacgattgttcctgaaatagatattccgggccattccgccgccgccatcgtttcctatccggagttgaaattgtccgccaggcctctcgcggaagtgcccgtgagtttcaatgacggagcggcgtttgatcccaccagcgaacgtacctaccagttcctgggagacatcatgacagagctggcttccctctttcccggaggtatcattcacatcggcggtgacgaggtgcggtacaaaaagtactgggaaggcgtgccccacattgaggcgttcatgaagaaaaaaggcattaagacttttcccgaccttcaaataatgtttacgaatcggatttccggcatgctgactgagagggggcgccggatgatggggtggaatgaaatactggggtccgacgtgcacaatgacggcggccggggagctgcgctcggcaagctggatgcaaatgctatcattcatttctggtatgggtccgataaaattgccgccaaggcgatcagggaaggccgccaggtggtgaattccacttcccacatgacttacattaacaaaggatatgacaagctccctctgtccaggtcctattcttttgagcccgtttttgcgggattgaacccggagcagcagaagaatgtcatcgggctgggctgccaggtctggacggaatggattgcggacgtggagaaactgcaccgtcatgtatttccccgtattgccgcttatgcggagacggggtggacccggaaggaggataagaattttcaggatttccggaggcgtttgacggggtatgaaaaaattctggatgcccagggcatccggcacggtgaaaaggagtagttgaaaaattcgccgccggggatgaagcgtcctggctgagtcaacagtaaacccgcttgttacttggttaaggattcgggagagttcctgtcaatggcttctttgaggcgttccgcccgcgcctgcatgttttccagaattttcagaatataagaacgcgttgtagccgagtgttccgctccgcgtacgaaggaaagcccccggtacagtcctaccgtttccaggcggagattcatatcttctccggacaggtcttcactggagggaggaggataattggaagcggggccgttcagggacttcatctgcatggtatccatattaagcaggcagctttgtattccgttagtgaaaatcaggctgccctgatgatgcttgtcctccggccacagcctgtaaatggtaacggcgcttctccctccgggattgatcaaaatggcggggaaaacgtgtttgccgccaccctttttccggacggtcgcgtcaaaatcgcattctccggaaaacctggtcgtgacacgggaggagatgcatacttcaaaaggtacttccggcggcaggggaatcatggtggcggcagacaggggtgaccccggagggagttccggaatcgggaaggggagcgtaatgatgtcaatggcgcagctgatgatgccgatgatggcgaatagcaggatgcctttgttccggagctgggctgacattatttttccatattcctccggataatgcctgcctgcggatggttcctgccgcaggtaatagccggtcaggcgtgaaataacggccagagcggcagacatggctgccagccacgccagggcaaaagccagattttccgctatgggaattgtggtgaaaaagccgaatgttccaataatgaccgccgtcagcaggagaaagacggccaggaaggttatgcagcctaaaggggccgtggagacgggaatccagaaactgctgcgtttgccgagggctctcagaatcaggatggcaatgcaaaaagagaagatggccagcgttgaataaaaatgttgaaacagataatcgagcatggcatgcgggaaaaacttggataggcaagcggggagcgattccatgccggtttcctgaaaaatatccggaaacaagcagttttgcgccgcgaaacgatagaagccgaatgttgaactcctttattattttagcctttttccatccttgcctgcaagattttttgtttacctgtttctttctatttgtttttgatatgtttaaaaagcattgtcccataagaaaatatgggaaaaaatcgactccattttcattcagtgaaaaagatgcggttttctataaacggaggattccaaaatgataaaactgtgtgttatggataagggaaaaagagtattcctgccatggagatgttttttcccgtttatgaatgaaaccgctgcgccggttttcccttcattcttttcaagataccgggcggggagaagagccccggccggatgtttacatgcaagagcgtgggggaggcagctccggccgggttgatgaggaaaaacgcttccctgaagaaactgctaccgctgttccggctttgccaacactttcctgagtttcgcgaagcggggcagggaacattccttttgcatggccgtttctccctggatcaggggaagaacgtaatcaatgaacggctgttccacgccattgccgcgggcgttgatccattcgcggggaacaagtttttccacattggccacttcttccagacctatcaatttagtcttgcaggaataaatgccgttctccgtgattcgttcaaaggctaccattttatccgtctggccggaaacggcggcttccacggcggcttttcccgccatatacgcttcatcgatatccgtcttggaagcgacatgggaggcgcagcgctggaggagtgagagctcaatgcttctgactttggccccggtttgccgcttgacggattccgcaagcatggctcccaggcctcccagctgcgtatggccgaagacgtccctgtctccggattccgcaacaaagcggccgtctgcatattgcacgccttccgagacggcgaccatgcagctgccgttctgcctgtaaatccggtccacatcctgccagaattcctccatgcggaagggaacttccggcaggtaaaccaagtccggacctgctcccgcatacgtggccagggctgcggatccggccagccagccggcgtgacggcccatgatttccacaatggtgacgcgtcccttgtcgtatacgcggaggtcctggtgaacttccatgcaggaggtagcgataaatttggcggcagagccgaaaccggggcagtggtccgtgccgtgaaggtcattgtcaatggtcttggggattccgatgacgcggcattcgtaaccggactgctgcatgaatttggatatcttgttgcaggtatccatggaatcgttgcctccgttgtagaaaaaatagcgtacgtcgtattttcggaaaatttccagcagacggcggtaatccgtatcatccacggacggggctgccatcttgtagcggcaggaacccagggcagatgccggggtatatttgagcaattccaattctccggggtcttcccgggccatatcgaacaggcgttctttgagcactccctcaatcccgttggcggctcccagcacgcgcgtgacctgttcgctttgcagggcggactgaatagctcccagtgcgctggcgttgatgacggcggtggggccaccggactgaccgatgatgcatgctcctttcaatgggttcatgggcaataatggatgagagagttgtgttgcgtcccctttcaacggagttggaggcagggaatgaaatgatagtcaaccctatccgcagcccggagggatgtcaaacattattggttttccggatggggctggagaaagtggggaagaaaaaagagcaggggtgtcagtttttttgtctccagagcttttccaatgcggaggcaaagcgttctcccaggactagaactccatgcgtgcccagatggacggtatccgtgggatagggggtgcggaagtccatgctgcgcagctggagatcgtctgctgggacatagagcgcattgttgacggagagggaagtccgggattcttccgccacatccttttgcccctgccgcactttttccctgcccggaaaacgggccggagcgggcacgggaagaacgctgccgtagataaaggccagaccgggggcttccagatccgctctgatgcgtttaatcaggttgttcaggttggcgccgtaagacagagcgtttttgatgccggcaatgtcccttgcgtctccttccccctgttgccacaccatggctttcaggacaggagcatgtccctgctttttcagggcttccattccgttgcggacggtacggagcaatttgacgtattcttccccctgcttatcctgagaagtttttcctgggttccattgccggaaaaggttgcttccgctccgggcgtgcttgatgatgacccattttttttgcgggaattttttctgcaacgctgttcccaggcttagttccacgccaaaacggtcgggggattcggatgccgggctcaagggaacaagctgttctgccggttctgtccctttgagggagcctgaatagtacagaagaatccgtttatccgttttgaagcagggaggaatgttgttgacgtacccttgccctgtggcgtttgactgtccgccgataaggatgacgttgacttcatccgcatacaggggtggcgccggaaagaccgtcagggagcaaagcagccatgaaaagaggaaaaaacgtgcagagcgtggaagtacggaaacaatcatggcggggatatccctgatacgtttcccgaaagaagattctgtcttctgcaggaattcttctttgcctgctgccaggatatttgactgttgatgttttcctgttcccttgattctttcctttccggaaaaaggcattatgcggaaggtgcgtgcagggaaacggattggccggggtatatttccggaatgacggaaatgctcttaatattttttccggctgtcagggagcggagcatccgtatgagcttgtgaaccgtttttgtctggttctcttcataataggtgatcgtgggcagcaggcgttccatgaagggttcatatgtcaggctgaccaggctgagctgatccggaatgctcagcgaacgggcttccacccaggaaaggatgggaacgatctggttgccccgtgtggctaccagggcggacatatccggatgttctttaaacgctttggccaggtattcaaagaagagcggcgtttcaaacggggtgggaaccaggatgggattccatccctgttccgcaaagctgaaaaaacctttttgcatgagctggtggcccttcaacggatcaggaggcaggcacaggcctaccgttcggtgccccttgttccaaaggtgctgcgccgcatgatgcgtggtggccgcccagtggcggtccagatagggaaggttgctgctctggtaggaggtgccgcgcacaatgcaggggatgcggtgcgtcttgaaccagagctgggtttgctccgaggaacggtgaagtatccagcagacgcattcggatttggtaaccagcttggcaagcctcttgtccgggttattgcctaagatccagggagcttcaaagatacggacgctgatgccgtcttcctccagaattttggagatggtatatatctccgccaatacgctttgagccagccttttgaggggttggggtgtcagaaatccgagaatttcttttttttcctgaaccggatggcagaagatatttttaaccgtttcttcttccgtagttttcaggatgcgcctcggaaccttgatgcgtgggggggcaatccatgcatccctttccagaagggccaaagcctttctgatggtttccctgcctacggataacctgtgcccgagttctctttctccgggcaggatattgaccaggctgccgctgagaatcatctgtttgattttattggctactgtttcaaccaatgaagaagctggcaacgaagtcatactcttgtatatacgtatcgcattgcgtaaattcgagccaattgtagggggtgcctgccccgcagaatccgaaaggagagctggtgttgttgcaagttgttgatattctgtaaatcgttttaggatttaagctactggtcttttttgatgaggtaaagtgggcggataatgtataaatgatatagtgttatcaatgcattacattcctgagcggtacggttgcaggtggtttgtgattattttttaattcatttaagataaatattttattgcgtattttgttaggcaggtccatttattattctcactttaccccatatttccgccaggaaatatgcacgtatcggcatggatgacttttcttccgtttccggcactaaatctgcttgatgaaagtgaataccataccgggcgcatcctatgcgctgacttgtacggctgcgtgtactatccatgcgcttcttagcgacgcttcttctctagttatcctggaaacggaaaactccggacaatatttttttatagctcccactgatacaatagaggtatcagacgaacacgccctggtgacacaaacttttaaagcagccgctccgggatcgtctgcccgcagcggcataaggccgggagtaaatgccgatttaaaaaatccgacggtggaaaaagcggtatgaaccatttcttttttctgatcgcccgcgattaagcgcagcgctcatgagcaatccggtcaaaaggctgtttgtccatggtttttcgaacctttacggggagcgggacttcaccgccagagcattgtctggcgcggactgggtgcggaagtccgtctcattccgtcctggaattgctatggggagtctctttaagaaatgaagcgttatcgactgataatagaaaaccctgggagcgtttagctaccagggtttattgattggtaccgccggtgggactcgaacccacactcttttggaactcgattttgagtcgagcgcgtctaccattccgccacgacggcacgtgaagcgaaagaattaagaggcaagagggccggagagtcaagaatttcctgtggaatatggtgagttgctgaaaaaacggagggattttcctgcggattccctacgtcatgtttccggatggaaataagtgttaggaatgagcagtgcacggcagcgttgacgctttggttgaccatgtgttccttctgttccaggcggtagaaggtttcggctcccaaattctggagatggtccggttcagaccagcgttgacgattgaggtatggtgtcccggccgaacaccggattccctttttattccccgcctgtgccgcgaacttcccggaagagctttttatggatgatgaaagcggaaccaacatggcacaaagggggatgatacgcttaatctccggcgtttgcttttcctgactaacgggagaaccgctcttcgggcgtttcagccttttttcacggtcaggggcagtcccgccaccatgaagtagacttcatccgcgcttttggcaaggagttggttggcaatgcccagcccgtcgcagtagtggcgcgtttccgcatctgactggctgatgcccatgccggtttcagaagaaacaagcacccatggcacgggggattggcggatgagctttttcaaagcttctatttcctcaatcagcgcttcctggaacggctcgtagtccgtggggtccttctgggcgtacagggtattggaggcgagcaaggtgacgcattccagaatgacgccgttcacctggtccagcaagccggattccccgacggcagaagctacatgacggggacattccagcgtgagccagcttttaggacggcgttcctggtgcttgcgcacgcggtattccatggagctagctccgggccagacttccgccgtggcgacgtacaggattttttttccgaatccggcggctatttgttcagcgtattggcttttgccgcttctgatgccgcccaggacgagcgtcatgcgtgcggtattggcgtcagtgtttggtgatgtagcgttcatgggattccagcatggcctggtgggagttcaggaagtcatccaggctgaagacttccagcgtaataaggggggagaaatgaaggtcccacatggggtgcagaatggcgtccagcgtagcggcaggcatgtggtgcagggatttgtggtcccgtttttccagcccgtgcaggtggcacatgcgtatgtccggcagccagagcggcagaagtttttccggccgcaggccttctttccagacatggcctatgtcaaagcaacgtgaatggggtgtagcggctaccagtttgtccagatagtcggtcggatggcgttccaaattttccagggccaggcattccggtgcggggaggtggggtgtgatttgttccagactccggaggattcgttccgtttcgcgttccgtaagatgggggcgcatatcaggaccggggatatggtccgtgaccacatgcatgacccaggtgtggggctccagttcccgtgtcaggtcaatggcgcgaatgatgttttccgtataacggcggcttgattcttccgtggcgaagccgccgtccgtaggcaggtggacgttccaggtaaccccggcatctgtagcgattccggccagttcccgtatttccgcaggggtaatgagttcctttccgcattctccggcttccagcaggagcagggcgacatcatccgcgtaatggacgcattccctgatggcgggcacgtagtagtccgggatgatgaaggaggtgcatccgatgttgaggcctggaacgcggcatttgtgtggagttttcataaagtgcagaaggtgagcaggacaagccattccgtacattccacggtacagccgaatacatccccggtaacgccgcccaggcggcggcgcgcgtatagaagcaggcccatggagcaagccagggcggagagcagggcgtacagcccgttccatcctgccagagcgcaggcagccagggtgacggctgcggcagccagggcgtgcctggggcgcgttccctgcttgaacgcttcccccatgcctccaggccgtgcgcccggaaagcgcatggcgatgaatatctggctgcgggcaagcaatcctgccagagcgcacgccgtgagcagaagttcccaggagccgtgggccgccagagtcgccagggcggctcccttgaacgccaggttgaaaaacagggctgtgccgccgaaggtccccaggcgggagtctttcatgatttccagcctgcgttcccgggatacttcaatgggaagcccgtctccgcagtccgctactccgtccaggtgcaggccgcctgtgacggctacccagcaggcacagccgataacgccgcagaccaggggggggaagagcagggttgccgtccaggtcaggccacccgcaagcccccccactaccaggccaaccagcggtagccaggcggaaattccgttcaggtcattttgcagcggccacggccctacgggcaggcgggtcaggaagccgaaggcggagcggatggtggtgatgacagccatggatacagggaagaaagggtcagcgcggaacggtgatgtccagttccggcagggttttcatttcagaaagtacgcgcgtggcggcgtccagcaggggaaagaacagggccgcccccgtgccttcccccaggcagaggcccaggtccatgtacatggtgacgccgatgtggtccataatgagcttatgccccggttccgcggagttgtgggagccgatgaagtattgcgccgcttccgggcgaatgccctgggcgatggccgcggccgccccggcaatgaagccgtcaatgacgatgggaacgcgcagggaggccgcccccagcatcagtccggccatggctcctatttccggtcctcccaccttcgccagcacgtcaatggcatcggaagggtctggcttgttcagggcgattccctgttcgatgagttttatttttttgcggatgacttctcctctgacgccggaaccgcgtcccgtcacggtttccacaggggtgcccgtgagcacggccacgatggcggaagagggggtggtgttgccaatgcccatttctccggcggccacaatgtccagccctttgtttttttcttcacgggccatgtcaatgcccacttgcaggcattccagcgcctgttcccgcgtcatggccggccccctgctgaagtcgttggcgccgtgcatgacttttcttttgaccagacccggcaggtcgccgaagtcgtaattgacgcctacgtccactacggaaaggcgtgctcccgcgttgcgtgtaaaggcattgatcgtgcctcctccctgaaggaagttgcgggtctggatgtaggtgacgtccgtggatgtcaggctgaggccgtggtcggcgatgtggtggtccgcggcgaacaggactatggctttgtccttcaggcgcggcgcgggattgccggtcatggcggcaatacggatggccacgggttccagttttcccagggcaaggggaggcttggccagaattttttgatgttccagggccgcttttgcggcctgttcgtccaacggggggatatgcagtttgttcatgatgtccagaagtggggggtgaagagaagaaggagagtgaacgccagcgtacccgtggcggcagtcgtccacatgagccgaatggccagggccaggtcgctggcggaggctttggttcgccctgttcctatccaggggtagtttgcaggaattcccttgtaagagaccgggcccccgagacggaggcccagcgctccagcgaaggccgcttcgctccatgcggaattggggctggcgtgggcgttccggaaggcccatcccatggtgagcgccctccgggcggaggttcctttcaccatcagggcggaaaaggaaatacacggtaaaataaggcgtgcggggatgaagttgagcgcgtcatccgtgcgtgcggcaaaggtgccgaagtgtctgtaccggtcattttttttcccccacatggcatccaggatgttgaaaacacgatgcgccagcgcggcggaagccgccccggaggcgcctcctgtcaggcagcctgctgaggcccagaacagggtggaaaaaacgccatccgtcaagttctccgccacgctttcaatggccgctctggcgatgccgtagacgtccatccgttccgtatcccgtcccacgatcatggagacggagtgccgggcctctccggcgttcccgctgcgcagggcgttttccaccttccgggcatgctcggccaggctgcgcggggccatgcagatgtaaataaccagaacggacggaatccagggtgcccagggggagggtaacagggaaaagggaaggaagagcgccgcgcagccgaaccatgcggcaatgcaggttgccagcgcggccgccattcccgcatgaaaagttcctccccacctttgcctcgccagtgtttccatgcggagcgcgcaccggccaatcagacagacgggatggaacctgttgggcggttctcccgccagaatatccagcaggaaggccgcaggcaggatgaatgggcacgggaacatgggtcagcgtttcagttggagagctcggtaaatggttttcaggtccagatgtttccggaccacgtccgccagacggtccagcgctccgtccaggtcataggcggtgtgcagggctgggttggctttcagccctgaatctttcctgaccatgttgatgaatgcgcggcggaattggtctccgtccagcatgccgtgcagatacgtggcccagatacggcctttgccgtagccgcagggggagccgtcttcccggaacatgacgggggggctggattcttgatggctggtgacgccatggtggatttcataacctgcggcgggaacgggcagcggcgtgtttgcccggcgtacgttgatcagggttttggctgaggagaaggtggtggaaagttccagcagccccagtcctggcgtgcgctcctccggggattccatgtgcagcgggtccagaatgtccgtccccagcatttgcagccctccgcagacgcccagaagccactttcccttttcggcatgacggcggatgggttcttccagcccggcggaacggagagaggccaggtccgcagccacgcttttagtgccgggcagaatgaccaggtccggatttccccattcctcccgtgtccgcacctggcggagccggacgtccggctccgccgccagaggggcgaagtccgtgaagttggagacgtgggcgggcatgactacggccacatccaggcaatccgcatgtttcccgtgctccccgtggccagggggcagcgtggcgcggtcttcttccggaatgttgatgtcccgcatcatcgggatgacgcccagcacaggcttgcccgtacggttccgcatgtagctgtgcgccggggccagcagatccggatctcctcgaaatttgttgaccacgaaccccgccagcagttctttttcccacggggcgaatgtcatccacgttcccagaaaggaggcgtacactccgccacggtcaatgtccccggcgagcaggactctggcacgcgcgtagcgggccatgttcatgttgaccacgtcggctgatttcagattgatttctccggggcttccggccccttccaggcagaggagttcatattcgtccgccagggaatcgtatgctttgcatacgtccggccagaagcgccttttagccgtgaagtattcccgcgcgtccatgcggcctacggggcgccccatcacgatcacctgggagccggtattggaatggggcttgagaagaatggggttcattctggcatccggatcaatgcggcaggcctgggcctgcaccagctgggcgcggcccatttcctctcccagcgcagttacgccggagttgagagccatgttctgcgccttgaacggcgccacgtgatagccgtcctgaaggaaaatacggcacagagctgccgtgagaacgctttttcctgcatcggagcaggtgccctgaatcatcagggccggtttgggagccttacggataatggaggggccgtttcccgccagttcggcgcgcagagcttccgccagcagggcgtgttcctccggcgtgcggacgccggagcgcaaccagcctcccgtttccagccccggataattggaacagtcgcgcagtgcgatgccgtattttttcaggagccgggctgccaggccatgaggcgcccccgccaggcggaagagaaggaagttggcctcggacgggagtacggcggcgcccggcagggaggagagcctgcggaacaggtcgtcccggcgttcccggttccgggcgcgttccctgtttgcccaggaggagggctgtgccagcacggccttcaccgctgccgccgcaaaggcattcacgttccaggcgggcagggattgccgcatccgctccgcgagcggagcggcacagatggaaaaaccgcaccggacgctagccatgccgtaaaacttggtcagggagcgcagaaccaccaggttgggaaggagggccgcttcacggagcagtgattccgctccttgtacgtaatccatgaaagattcgtcaatgatccagaggacttcggggcggctctggacaaccctgtgcagggccgctgcgtccagcaggccgccggacggattgctgggatttgccagaaaaacagcgcttccgtctgcggcctgttcctccagacggcaaagagacgggaggaaggaattccgttcctccgtccggatggaaagaacatccatgccgtggcgcaggcaggccagcctgtattcggaaaaagcgggttccggaatgacggcctgtttaaggtttaatgcgcgcggaagagcgtgaatgagttcattggccccgtttccaaatacgaagcagccggaaggaagcccgtaatgaaccgccgccagttcccgcagatccgccgcatccggagaagggtagggtactgcgttttccatggccttccacaatgccgaagcgatgaactccggcataccttccggcctcaggttgacgctgaagtccaaaatatcccgttccgggcggcaggcctcctccgccagggattttaaatctccgccatgtgaaaaaacgttcatgccacagtaattggaaccggcgtaccgaagggctgcccgcgccggagaaagaaaggaagcgccttgcaagttcggaattccacatagccggaagcttcgccggagacgggaaatcttccctgttgcgggaacgtgggaacaaggagcgtcatgagcgcatcatgtcctgtatgcgccgggagtgacaagacaaaaatggaaagccccgtgaggaaaagagggatggagaacaatacgctgaaaagggaaaacggctgcaattcatctggatgttcaaagaaaattttttttgtcttgtcataccggtctctttggtatttcatccgtcccatgaacccttatgggaagggttacagacctcagggacgcccgtagccgggcaggaaataaatggggaataccggtgtgagtccggagcggtaccgccactgtaagcgagcctgcctcgcaagccagaaaaccagcctgtgaggttgtccaactgttcggcgagttaccgaacgtaaggcactacaaccatgctttatacgaagaaagcccttcaaatgggcgcaattgctgttggccttgccgcattcgcaggccagtcctctcttgccgagtccgctaaaaaggaagactccaagccctccgtcaggacggaaaccatgcaggttatgccggaactgaccatggcgtcccactttgtgggcgtgccgtacaaccggtctggagtgtccgtttccatcatcaatccggaagaattccagaaggcaggcattgaaaccctgacgggagccctttcccagacgcccggcgttttcacgctggacggaggcggcacctggcagcgcggttccgtgagcaacaccgtcatccgcgggatgaacaaggatacctacaccctgaccatggttgacggcatgcgcatcagtgatgccaacatgtccggcaacaagctgctgggcatcaccaatctctttacggtgggcaatgtggaagtggtgaaaggagcgcagggcgccgttttcggttccggcgccattggaggcgttgtcgcgatggatactccggagggggaaggcgatcccgtaaccaggatttttgcggaggccggttccttcggctctttcaacagctatgttacttcctccggcaagatcaagaagctttcctattttgtaggcgttgggtttgaaactacggaaaacgatccgtcaatctatccggccatttatgacaacaggacaggtatgaacgatttccgccagtggcaggaagccgtgcgcctgggctatgacatcaatgacaaggtgaaggtgagctttacctatcgccgcctggattcctactttgaatatcccacgccgtatgtggattataaccagtggccttccgttccggatccccatctgtacaatacggaagacaagaaccgcagcaacctggtgacaggacgtgtggatgcggaaatttccaagctgtggtccaccagcttcatggtggggcattacaacatggactattcctgccatactcccggatttgacttccagcccaacgtgatgcgcaaccgccgcttccaggcggagtggcgcaatgccctgacgtggaacaaggaatggaaaaccatcgccggcatggcctgggaccgttccgactacatgagcgaaaacaattacgttgccaaggatgaatggcagagcacgcttgccttctttgcagagcaaatgtggtcacccacggacagctttgacgccagcgtggccctgcgcctggaacatgattccgtctggaacaatcattttacgtggcgttattccaattcctggaaagtgacgggcaaggattcccccacccgtattttcggttccgtagggtccggtttccgcgcgcccacctggtttgagcagtatgcggccaattacggttatgtaggcaaccctgatctggatgtgtccaagtccctaggcggcgacctgggtgtggaacagcgcctggcggacggccattatgcttccgtgacgggcttctggacccgcattaacgatgaaatcggcaccaagagcgtaggcacctggccaaactcctataccacttacgccaattattcccactgcacttcctacggtgtggaagtggcgttcaagggtcagttcaaggacgcgtggaacagcggctattatgccaattacaccttcacgatgcccaagcgcgattccatcggcaaatacgagaccattcagatggccaataccgcccgccacaccgtcaacgcagaggtttatacctccccggttgaaaagctgacggttggcttcggcgtaacggccgccatgggacgcacggattacaactatgcccgtctggacaatttctttacggcgcgcctgtttgcccgttaccaggcaacggacaatgtgtccctccatgtgcgtctggaaaacctgtttgaccagaagttcatcatgacgaatgattataacttcggtccgcgtgaagcccgtggattcggaatcttcggcggtgtgacggtcgaattctaagttcctttcaatattaattgttgattgctcccccatcttccgccttgcggactgtttcaggcgaagtgaacggttccgcgcggaagatgggttttctgttttccgttgtttccggaatcggttaacatgtggcggccatctgagttgtgttgcgctggatatccatactgggggcattggccctttccgtctttctgggaggtgtcttttacttttcccagcgtgagaagaatgtctggcatgaattttccggacggatggacggcagggggatgcctgccgtatttgacggttttgtggaacgctggaacagggctgtggaacgggaactgcgccgtgaattggctgaaggggagaggaaggaaaaacttctggtcgtttcccgcggggaaggggacggccggcgtttggcggaacaggctcgttccgtggaacgcatcaggaaaaggctgttattgaaagaccatatccgccttcttcctttggaagacgttccggacggattggaatggcaaaccggaatggaagagccggatgtgggtgatccgcgcgccgtcaagggtggaaaagtccggctgtggatcaatactccgtttcccggaactttgcgtgctttcgggccgggaagtgaaaattttttcaattattccgccattgacaacgtgtggcttcccctcgtggggcttcatccggaaaccttccgtcccattccgggcctggcggaccgctgggctttgtccgcagacggaaaaaccgttttttatcatctggatccggaagcggcctattcggacggacgcatcgtgaaagcgcaggattttctgctgaacatttgcctccgtacgtccggttttgcccgggatccgttctggactaccctgttccgttccatgtatgatcagattacggtatacggggattccgtcattgcccttacgctgccgtcccgcgggccgctgctgccttacatggcctgtgcggattttcatccggcccatcccggtttttaccatgatttcaacgcgctgtttctggaacgctaccagtggaaagtccctccaaatacgggtggctacatggttgttcccgctaaaatccggataggagaaagcattaccctggcccgcgtgaaaaattggtgggcgaaggacaggaagtattaccgccattcctgcaatgcggatcaggtggaacatgtgtttgtgaacatggaaaacaaggcggttgaaatgttccgccgcggggaactggacatcatgaacgttcgcaagccggaggtgtgggaaaccgggctggagctgccggaagtgcaccggggctatatagataaatacagcctggaagccaattacgcctgtcccccgtacggactgtatctgaattgctcggacaagttgttgaaaaatccggatatccgccgcggtctggcgcattccgtgaacatgggcctggtgattgagaccctgttccgcgggaatatgagaaggctcggttcctacatggaggggtacggagacctgactcttccgctgaaagctccggaatacagcaagaaaaaagccatggaatattttgcccgcgccggctaccgggaaatggggactgacggagtgctgaaaaatgaacggggagaacggctggtggtggaactgacgtttgcggattcatccaccctgatgaccaacgtctgttccgttctccggcaggaggccctgaagtgcggtgtggacctgcgtctggattcccttacctacaatgtctgttcccgtaaggtttttgaaaaacggtatcaggcggctctgtgggcgtggccgctgcagacgccgttcccccggctgtatgaaacattctcttccgaactggcgtatgatgcccgcggaaatcccgtaggcaatacgaataatattatggctgtgtcggacgctggactggatgccgccctggatgcggaacgcaatgccccggatatcggttctctgaagctggcccttcaccgtgcccagcagcgtcttcatgaactttgcgtctggattcccggctggagggaaccctacacgcatatcgcctgctggcgctggatacgctggccggaatctcccacccggttctgttcccccagaatttacaatccgctggagtcgcacctgtactgggtggatgaagaaatgaagaaggagacgctggaggctcggagcctgggcgtaccgtttgaggaaaagaatcaaataatatatcttgaaagacaggatggtgccgctccgtaataaaaccgggtcaccgtctcctttttaaattgaaaggaggtggtttttcatcataatctccctctcatttaccataattaattattaattccataaccatgaaattatcctttttctccgttctgcttctggcagggcatctttgtgcggctgctcccatgcctttgccggaatccaatgacggagccaggcatgtcttctctactaatcaggaaaattttttgatggacggaaagcccgtcaaaatcatttccggggaaatgcattatcctcgcgtgccgcgccagcactggaaggacaggttccagcgcataaaggccatgggcatgaataccgtctgcacttatctgttctggaacgtgcatgaaccggaacccggcaaatgggacttttccggcaatctggattttgtggaattcatcaaggaggcgcagaaggccggcctgtgggtcatcgtgcgtcccggaccctatgtgtgcgcggaatgggaattcggcggatttcccggctggctgctgaaggatgaagatttgaaagtccgttcccaggatccccgcttcctggaaccggccatggcttatcttaaaaaagtctgttccatgctggaacctctgcagatcaccaggggaggtcccatcatcatggcccaggtggaaaatgaatacggctcctatggttctgacaaggattacgtgaaaaagcatctgaacgttatccggaaggaacttccgggagttgttcccttcacgtcggacggcccgaacgactggatgatcaagaacggcacgcttccgggcgttgttcccgccatgaatttcggcggcggagccaagggcgcttttgcgaatctggagaagcacaagggcaaaacgccccgcatcaacggcgaattctgggtgggctggtttgaccactggggcaagcccaagaatggcggcagtacggaaggtttcaaccgagacctgaagtggatgctggaaaataacgtttcccccaacctcttcatggcgcatggggggacctccttcggcttcatgaacggggcgaactgggaaggcgcctacacgccggatgtaaccaattacgactacggcgcccccatttccgaaaacggaaccctgacggaccgctaccgcaccttccgccagactattcaggattattacggtgatacgtacaagcttcccgaacctcccgcccagccggaaatgatggagctgcctcccatcacgtttacggaaacagcaagcatgttctcccgcctgccgcagcccgtcatccgcaaggagcccgtccacatggaagccctggggcaaagcctgggcttcatcctgtaccggacaaaggtgaacggcccggtgaaaggagagctgaagatgaacaacatgcaggaccgcgccatcgtttacgtggacggcaagaggcagggagcggcggaccgccgttacaagcaggattcctgtgacattgttattccttccggacttcacacggtggacatttttgtggaaaacatgggccgcatcaacttcggcggccagatacagggcgagcgcaagggcatccggggccccattacgctggacggcaaaaagctggaaaacttccttatctacaacttcccatgcaagggggtggagcttattcccttctccggcaagaagccggcgggcgaccagcccgtgttccaccgcgggtatttcaacgtttccaatcccaaggatacctacctggatatgcgggacggctggaagaaaggcgtcgtgtgggtgaatggacgcaatctgggccgcttctggtttatcggctcccagcaggctctttattgccccggagaatacctgaagcccgggaaaaatgaaatcgtggtgctggacgtggacggaggttccggcacggtgaagggtgtgaaggaagccatctatgaagtcaacagggaccccgccatggcggatgtcttccgcgtgggcaaacctgtggcccccgctgctagccagctggtacacaagggttccttcgccaagggggcagaccagcaggaaatcaaattccgcgctcctgtccaggcccgttacattgctattgtcagtaagaacgctcatgacaacggcccccatgccgccattgcggagctgaacttcctggatgcctccggcaatctgctcccccgcgaacagtggtccgtggtttatgcggattcccatgaaacgacgggagaagccgcccaggcgggactggtgatggacaaccagcccaccacctactggcataccaagtggcagggggacaaccccagtcatccgcacatgatcgtgctggatctgggcaaggtgcagaaactttcaggattccgctacctgccgcgccaggaccgggaaaacggccgtatcaaggactatgaagtctatgcgtctcccaagccgttcaagcctgccaagtaagatcctctgaattgctgaactttccagggccgccccctcatccgagagggagcggccttattgcgtccggatatcccggaagaaaacggtccccccgcttttcccggacaagagtagcgccggtttaaagatacgtatcaacttttcgtttcccttgttttctgctgttgtgcgggctggtattccatgcgcaaaaaaaggcggctccgcagtataacggagccgccggaaggcagtaaaaacctgatagccggttgttagaagttccaggaaaagcccagcttgatggtgtggtagccgggatcattataaccctgaatctggtagtattcgtagccgatcaggaagtccgcgctgttggagatgctgaacttgaaaccggcctgggccgcccaggaaaacttggtggaggaaatggtgcgggaacggctgccgtcttccaggccatgaatggtggtcttcacgtcgccgtaagtggcgccgactttaccgcccagatagaacatggtgtagtcgccgatgggaaggttcagcgtgtaaccggccatcatcggaatataggtggaacggaggctggcggtataaggcccgctaatgcccaggtcctgcacgctgggatggtgggaaccggccaggatgccgccgttcagggaaatctgatgaacaatgctgccggtttcaatatagttgaaaatgctcagattgccgcctgccacgttgggcatggcatctttggtggcgattccgtaagccccttccagggacatgccgaactggccgtcgtacttgtcggcatgataggcgctggcggaagacacggaggccgcaagggccaaacctaacagtatagtcttgttcatatggggataaatggtaaatttaactgtagtccattcttggcagttttctcttttgaagtcaaacatgaaatgtcaaatggacgcgaaatccccgagccgaagagatgaagttgccagaaccctcccgctggggtacattctgcgccatggaacaacaagcgtgtgatttgctggtgaccgcttcccgcatgctgggcggagcggaacagtccgttgctcccggggatgcggccgtcgccgtcctggacgggaaaattctggaaacgggaagcgccgcagaactggaggccaggtggatgcccgccgtccgcagagatttggggaatgtgctgctgatgccggggcttattaatgcccatacgcatgtctccatgacctttttgcgcggttttgcggatgacttgccgctgatggaatggctgaccggacatattttcccggtggaagcccggctgacggataaaatcgtctccctgggggcccggctgggcatgtatgaaatgatgcggacgggcaccacggcgtttgtagattcctacctgttggaagccaacgttcttcaggaggcggaacgcatggggatgcgctgtgtgggcggagaggttgtttttgcttttccctctccggcgtacggcgggtgggacggtgcggaagccctgtaccgggagcagtcggagcgcttttccggccgcggcagggtacaggtggccctgatgccgcacagcgtgtacaccaccagtgacgaagtgctccggcgttccatgaagctggcggaggaactggacctgatgctgcatatccatttgtccgaatccgccggggaagtggagcagtgccgttccctgcacgggggcaggcgtcccgtgggctatgcccgcgatatggggctgctgaatgaacgcgccgtgctggcccatatggtggacgtgacggatgaggaactggaactggtggccgcttccggtgcggcggttgtccataacccggtcagcaacctgaaactggcatccggcttcactcgcgtgcgggatatggtgcgggctggcgttcccgtctctctgggaacggacggagcgtgcagcaacaacagtctggacatgtttgaaacaatgaagctggccgctattcttgccaaggggtacagcggggacgctactgcggtccccgccatgcaggcgttgaagatggcgacggaggagggcgcccgcattttccggacgccggggctgggaacactggttccgggggctcccgcggatatgatcgccctgaacctggatgaaccgaacctgtgcccgattttcaacgaaacgtcccatgccgtttatgcctcttccggcaaggattgcgtgttcaccatggtggaagggagaattttgtatgatcatggaatttacacggacggcctgtatgcggataccgccgcggaaatgcgggatctggtaaagtgggtgaagaatagtgattgagtattgaggatgagcgaataaaggcaagttctcaacacatgctttaatctctgggcccttacctctgctatctgtcggcctcccgaaccggcgcatgctcatgttccttctttacccgcaaggggggatgcctttatagtaatttcatgcaatatgatcttatcgtcattggtggaggccctgcttactatgtgggcgccatccgcgccgcccagctggggaaatccgtggtgtgcgtggaacgcgaccgggtggggggcacctgtctgaactggggatgcatccccaccaaggcgcttctgaaaaatgcggaggcctaccggatcgtgacggaccgcgctagggaattcggcatgacggtggagggcgtcagcgtggattggagtgaagtgatcggccgttcccgcaaggtcagcgaccgcctggcaggcggcgtggggttcctcttcaagaaaaacaaggtggattccgttacgggggaagcctccatcatttcccccggcagggtggaagtaaaggccgccgacggaacggtgaatgttctggagggaaagaatatcctgatctgtaccggctgcgtcacccgcacggtgcccagccttcccctgaacggcactactgtcatcggctccagggaagccatggtgctggaaaagcggcctgaaagcatgatcatcatcggttccggagctatcggcacggaatttgcctacatttacaattcattcggcaccagggtgacgcttattgaagcgcttccccggatgcttcccaatgaagacgacgactcctgcatgacgctggaacgggcattcaagaagcagggcatcaaggtgatgacgggagcttccgtggaatccgtcacggaaacctgtgacggacaggtcagggccaacgtgaaaaacagcaggggacaggaagaggaaatcacggcggacgtctgcctggtggccatcggcgtgaagccggtcgttcccgtcgctcccggcctggaattgacggaaaagggattcatcaaggtgaatgaccgctatgcgacttccattcccggcgtttatgcggcaggcgacgtgatcggcggcgtgctgctggcacatacggcttcttttgaagctgtccaggctgtggagggcatgtttaatccggactaccagcccaggcaggtcggcttcttcccgagctgcacgtactgctacccgcaggtggcttccgtaggtaaaacggaacgcgccctcaaggaagcgggcgtggaatacaaggtggggaaattcccattccaggccattggcaaggctgtagccgccggagagccggacggcttcgtgaaaaccctgtacggcgccaaaaacggagaattgctgggtgcccatatcgtggggccggaagccacggaactgattgccgcgctgggcatcggcattcaggcggaactgacggatgaagatatccacgccaccattttcgcccatcccacgctgtctgaggccattcatgaatccatgctggcttccgaggggattgccattcacatgtaacggttttcacgggaagagccccccctccgggggctcccattgattcctttgtcctgtaaaaggatgaatatcaatctgcgttagaaaaagacgctaaagggtgaatttgttgatgacggctacagtccagcagttcccgtgaaggctcagataggctttgagctggctcaatagtcaatgtagatggtcgattgcaagccttggaaggccgcaatttgcgtgtacatctttacgatgattcctttggggagaaaaagcggggttccctgattaaggagaaatttcctccgtgctggatggtgtgcgggaaatatgaatggatgagtagatgataattttcgtagccataaggggataactgatttaagcaacaaatcctcatgtgtgaatatgcatggaagggcaattttcaaagaaaatattgcttgaatttccgaatcagataacttatgagaaaaacattccgcttcgttttcaggagattcaaaatgactaaaaatatactactcgcacctattctgaaatgggttggaggcaagcgtcaactcctaaatgacattcttcccctaattcaatccaagggaacgtacatagagccttttcttggtgggggtgctgttttattcgctcatcaacctaagaaagctatcgtaaatgactataactcggaattaatgaatgtttatcaagttgtaaaatcttatccagagcaacttatagaattattacaaattcattatgctaacaattctgagaaatatttttataaaataagagaacttgacaggttggaaaaatatcaagaactttctcaaattgaaaaagcatcaagaatactctatctaaataaaacttgttacaatggtttatatagagtaaattcttctggttatttcaattctccatatggaaaatataaaaatccaaatatagtaaatgctcccgtaatcagggcaatgtcaaagtatttcaatgacaacgatattactttactacagggtgattataaggaagtattgaagaaagctaggaaaggaagtttcgtctacttagacccaccatatatgccgatttccagttcttccaacttcacaggatatacagaaaacggatttgggtataagcagcaggaagagttgaagaaggaatgtgacaagctgagagagaaaggtattcggtttatacaatctaattctgactgtccagaaattcgtgaactttacagagagtatacggttaaagtcgtgcaagccaaacgtgttatcaatagcaattcagcaaaacgtggtgaaattgacgaagttttgatatatggctgatgaaacttccataaaaatgacagcggaagaagcgtggaatattttattgaacaagtataatattgttcaagaagtagagcagaatggtatattttatattacttccagccaaattaatgactataaagaagctagattgatggcgaaatgggatacttcagagagtcttcctccttctttgaaatctaataaactgaatattcttcctgatagcagaagttcttacgttatcggtgatttcatattatatgaggaaattcctgaattaacagaacgagttgaacagatgacgcaagttcaacttggagaatatgaaaccatagatgttaataacataacttccgaagcgaacgcaattaatgttcttgttttgtctggaatattagacgattttcttgaaacatccgataccgcagcgacctttaatgggcgtatgggtactggatgctttaattttgaggtaaatactcacaggaacgtgaagcgtaaaattaacgtaaataacgctcaatgtgagatagatggtggttttgagaatagtacggaagttgttattcttgaagcaaagaatgttttacacaaagattttcacgttagacagttatactatccgtataggttatggaggaataaggttagtaagccgatacgattagtgttttctgtgtattcaaatatgatatatcgtctgtttgaatacagatttaataaacttgaagattattcttccattgaattgatacggactaagaattattccttacaggatatgcatatttctttggaagatttgatggatattagaaggaatacagttgtcactaagagtgataatataagtgaaactgtcattccatttatccaggctgattctgtaaatcggcttatttccttgttggaaaatatggaaagcaatccgatgacagccgaacagataatagaattgatggattttgtaggacgtcaatacaattattatgtaagcgctggcatctatcttggaatctttgaaagagaattagaaaataaaactaccaagctaactgaaattggtgtgtcgttatgtcgtatgacatataaggaacgccagttgaagttagttagtttaatggtagaacatagaatatttgcagatttctttgactatgtgatagataacaacggagaattacctagtaaacaacaagtgtgtgacaagatgcgggaattgaacgtttgtaaaagtgaatctacaatggagagacgtgcttgttccgttctgagttggcttaagtggatatttaacttacctcatcttgctgagtaacttagttggggatggggtataatgaagtttcaaaatagattttgttttgaacttagtgaagaatttatgttagagcttccttatgttgttagcttctgatgcttacagaattcattctgaaccatacgatatgactctctgatagtatttctctctattgtacagaagatagcaccggctccgccttaccttccttcataggttggtcaattcaagagtaggaatcttgccaagattacagattttaaccagcaaggaattacttctatcaatggcacaaggaacgaaaacttgttgacgggaaagacaacgtttggatgcttctattttgcggtgatatgaagggtgaggcatattatgcttgcgattattatagctcacgtgaaaaaagtttcatcttctctatcaacctcttcagagaaatttctttctctattttacgaaagagttatccagtattttgtgatgccatacaaaagaagtctggagggaaagaccatactcttctgtgcagatttgcgaatggaaagttcctccaacatgtactctacatatttcttccatacagcaagtttttatgtatcttgttaaatatggaggaggagagagttgtgaagcactttctacagtctttgcaatggtttgtctggataccttttgcttaccgtatttctggactttttcagcacagccgcaatgatggcaatagacggcatgggaaaatttagattcttccagttcttccttggattctatagaatgattctgataggagcgttcaaggactttctgcaattcttgtctgtctgaatatgagaggaagtcatagctttcttgagttctatcagattcattttttgactccttcattttattatgacttgatatatcattatggttaaagtatcagtcaactactaatcgtaacagggccaatcaaaaaaagatatttgtttttttctctttagtatttagctttttcctgtggcgcctcataactcgaacaccggattttccacggcgttttttacggtaatgaggaattgcacggcctgcttgccgtccaccaggcggtggtcgtaggaaagggccaggtacatcatgggtcgggcgatgatttggccgtctcgaaccacggggcgttcctggatggcatgcatgcccagaatgccgctctggggcgggttcaggatgggcgtggaaagaagcgacccatatgttccgccgttggagatggtgaagcagccgccttgcagatcctgcatggacaggtttcccctgcgtgctttttccgccagggaagcgagttccagttccagctccggaagcgttttccggtcgcagtcccgcagcacggggacgacgagacccttatccgtgccgatggctatggagatgtcatagtacaggttttccacgatgtccgtaccgtctattctggcgttgacctggggcacttcctgcaatgctttgactacggccttgataaagaagctcatgaaaccgagtttggttccgtaccgttcccggtacgctgcattgaattgtttgcggagttccatcacggaggacatgtcgcattcgttgaaggtagtaaggatggccgcctggtgctgggcctctaccaaccgtgccgcaatggtacggcgcaacgggctcatgggttttctgatgaagcgcggagaggactccttttctgttttcccattttttccggaggttgtctgatccggtgaggatgttttcttttccggcttttgttccgggacgcctgtcacaggtgaggaggaaccggaagcgggtttctcccgcgtttccagtagtacggagggcgatgcggcggaacttccgtcaaggggagaaatgcggcctaaaaccgcgccgatgggggcttccgccccttccgggacgaggatttccagcacgccgctttcatccgcctccaaatccgtggaaaccttgtccgtttccagcgtcaccagagtatcgcctttggctaccgggtcgccggcattcttgtgccacgcggctacggtggcggaggtgatggattctccaaagttgggagtcaggatgtcgctcatgggagtaagatgggttcaggattgagcccgcggcccgaaggcagcggcgatgagtcttttttgtgcggcggcgtgcagcgctttggccccctccgcagggcaggccatggaggggcggcccgcatagcggaaggaagtggcgaagaggcgtcccagcctgttccgcaggtggccccaggcccccatattggagggttcttcctggcaccagacgaagtcgcgcactttttggtagggcgccagcagataggtaagctgttcctgcgccagaggatagatttgttccagacggatgattaccgtgtctgaaatattccgttccctgcggtaggcagccaggtcataatagattttcccggtgcagaagacggcgcgcgtgacctggcccggcgcgggagtattcggatccggcaacacttcgcggaaacgggtggaggccaggaattcccggtgcggggagacggcctccggacgggagagcaggcttttgggcgtgaaaataatcaggggtttgtgcacgttccggtgcacctggcggcgcagggcgtggaaatactgggccggagtggtgggattgatgacctgcatgttgtcatccgcacaaagctgtaggtagcgttccatgcgggcgctggagtgttccgagcccgctccttcataaccgtggggcagcagaagcaccatgcggttcttctggttccatttggcttctgcggcagcaatgaattggtccacgatgacctgggccccgttggaaaagtccccgaattgggcctcccacatgaccagcgcgtccggactttccagcgcgtagccgtattcaaagcccagtacggaggcttccgacagggatgagttgtaaatgcggaatgcggtggtgccgtgattcagtttttccaggggagtgtacagggagccgtcattgaagtcgtgcaggacggcgtgccgctgggagaaggtgccgcgctggcagtcctggccggacaggcgcacggtgtggttttccgtgagcaggctgccccatgccagggattccgccatggcccagtccagcaggccgccttcccggaaggctttccggcggcgggccaggaagcgtttttccagcgtggggtggggcgtgaagctgtccggaagttccgtaaggatacttccgatgcgctggaacagttctggactgattcccgtccgcgtgctggtgcgcgggaggggcgtttcatccgcatcctgcgcggtggcgggcaggatgtagtccgcggggttttccttcatttgcaggtaggcctgttccatgccctcccaaaggtcattccgaatgtcccgctcctgctgttccgtcaattccccgcgctccctgagcgccattccgtacagggcggcggcggtggggcgcgcctcaatccgcttggtctgcatgggcgcggtgaaggcggcctggtccgtttcattgtggcccagacggcggtaacagtacatgtccagaatgatgtcccttccgaattcctggcggaactggagcgcgaagtccgccgcccacaccaggtcttccgggctttctccgttgatgtgcaggatgggggattggagcatctgcgccacgtccgtggcgtagcgggaggagcgggcttcgtccgggctggtggtgaagccgatctggttgttgatgacgaggtgcacggtgccgcccgtgcggtaacctttcagcagggagagattgaggacttccgccacgatgccctgtcctgagaaagcggcgtccccgtgcaggacgagcggcagcacacgcttgcgttccgcgtcttgcaggttgtgctgcatggccctggccctgccttccaccacaggatacacggcttccagatggctgggattggaggaaaggcggatatggagttctttaccgtccacatgacgtgtggcggcgtaaccgaggtggtatttgacgtcgctcctgccgatgggggattccggcaggtagtccggcgtgaagtcgcggaagatggttttcagcggtttgtggagaatattggcgagcacattcagccttccgcggtgggccatgcccatttcaatgtgagagactccggcggcggggcagcgcttgatcatggcgtccagcaggacgatggctccttcccctccttccagggaaaagcgtttttcccccatgaagcgcttgcccaggaattcctcaaacagttccgccttgcagagatggaacaaggcttctctccggacttccgggccataatccacgccgtttgcccggagctggattttttcttcaatccaggagcggattttaagattgtctatgtggtggtattcaagtccgatggctccacaatagattttttgcagccgagtgatgatttcacggagcgtgaacgttcctccgtccatgaaggtgccgatgttgacgggctggtccatatcctcctctcggaatcccatatcttccggattgacggggcaaccggtctggtccggaggatccagcgggttaaagcgggcgcattggtgtcccatgacccggtaggcccggatgagctggttgacgcgcccgcggcgttccgcgctttccggaggaacggtgtagggggatgtgtccgcggcgttccccgcattttctttttcccggggggctccaccgctccccagttcgtagccgtcgaaccaggcggcccagagagggtccacggacaggggatcgtttttccatgattgatggagcgctgtaatttcctccggcgggagtttggagaagatggaggccttcatgcggcagggcggatggtacagggcgttttcggttcgctgatcgctatttttgcccgcagggcatcagtaactgtgttcgttgagctggacttttccgcggaagacccagtaaatggcagcggaataagccaggacgagcggcacgcccagaatggctatgtatgtcatcacgaccaggctttcccgggtggatgagccgttggcgagcgtcagggaatgttccggattgggcatggagtagagcaggttggggaacatcgctgtcccgaagagagccatcatgcagcccatggtggagcaggaggcgacaaaggcccagcccggacggttcctgtggatgaatatccagatggacgcgatggaaatgactgccagggcagcgattccgtaaatccagggggagcgttccagggcggccgctacgtgcggtacgtacagcagggtggccgccccgtgcaggatgatcaggacagtgaagatgatgacgcagggtctgagcagttttctgatttgttcctgcaggcttccctgggttttcatcagcaggtagattcccccgtgcatggcgaacagggcgaccgtcgtcagtcccagaagaatggaataaggattcagcaggctgagaaatgttccggtgaagttgccatggtcgtccagaggaatgcctttggtgacgttccccatggctacgccgatgagcagagctgccagaaggctgctgatggagaaagtggtgtcccatcccctgcgccaccatttcatgggctgtttgcttctgaattcaatggacacggcacgaaagataagggtgagcagcaggagcatgaaggccaggtaaaacccggagaagacggaggcgtatacgtacggaaaggcagcgaagagggctcctccgcccgtgatgagccagacttcgtttccgtcccatacagggcccacggcatttagtgtgagtcttctgttttcatcgcccttgatgaaaagctgaagagctccggtgcccaggtcaaagccgtccaggatggcgtatccggagaaaagcacgccgacgaggatgaaccagatgatttgcaggtctgcgagagtgagattgtccaacatgatttttaaagagggataaagattagtctttaacaaaaggaacctggagtttgccttccccggcgccgtcgtcttcgccagcttcctggtccggacctttgtggatcttatgggtgatttgatagaggaagagggccagcagcagggcataaatgacgaagaacatacccagggaggaaagggcttccgccgcggtgagggtgggggatacggcgtgttccgttctcagaatgccgtacacaatccatggctggcgccccagttccgctacggcccagcccgcctggttggctatttgcgggcccagtacggagaaaacaaagcaccagagcagccagcgcttctggaagagccagcctcttttccacccccacaggcccgccagaaacagggccgccagggcgcagccgatcaggatcatgagatggaaggagtaaaagacgggcaggatgggagggcgttcgtcctgcgggatgtcgttcatgccggtgatggacgtgtccaggtcgtgatgggtcaggagggtgagcaagtacgggatggagattcccgtcacttcatgggtggacgggttcatccagccgatgagatggaggtcctgaggggcgccggattccatgacgccttccatagccgcgaatttggcaggctggtggacggagacttctcgtgcgctggaatctcccgtgatgcccatgccagccacgccgatgaggccgatgaccaatgccaccttgaagcttttttccgatcctccggtaaaacgttttttcaaaatataccaggcggagacgctgaggacgagcgtggctcccgccagccagcagccggcgagcgcatgtgtcaggcggtccacggtggacggattgaagaccacgtcatagaagctggttatatgggcctggattttcccgtttacttccaccagcttgtatccggcgggcgtctgcatccaggagttggccacaatgatccagatggcgctgaaatgggcgccaagagcgaccatgcaggaggaaagaaagtgcatttttgggcccaccttgtcccagccgaaaagcaggatggccaggaagcctgattccaggaagaaggcgaagattccctccgccgccagggggctgccgaagatgtcgcctacgcagcgggaataatccgcccagttggtaccgaactggaattccatcacgatgccggaggctacgccaagggcgaagatgataccgaagattctggtccagaatttggcctgcttgtggtagaggtcattcttcgttttcagccacaggccttccagggcgaccagaaccacccccaggccgatggtcatcggcgggaagatgtagtggaacatgatcgtgatggcgaattggagacgggataataagaccggatcgtccatgattgattggggatgagtggatgtttatggaacaggaggacggcagccaaataccgataccttcatactttatacatcccaagagaccctttgttcaattattttccttttccgcagataactttttagattacgtctagaaaagaaaggcttaacactggatgaacacgtccatcccttcttccgccagagcaaaaagagccatcatgtccctgggagaaaggcgtatgcagccatgggaagccggggttcccagcagttccgtatcgttggtgccgtggatgtaaatatagcggctccgggtattggcgttgtgcggttccagtccgtccagccacagaatgcgggtcaggatgaagtcggaatgttcattcagacttttcgggatggcggtgggatagcggcctgccggaaggcgtgagatgaaaatagtgtcctccggttctccgtctccgatttttttgcagatgcggaaatgacctgtgggggttttcccggaaccttcttcatggcctgtacctgccttcccgctggaaacggggcattggagcaggatttttccggatttttccagcaccagttcctggcggggcagattaatgcgtatggaaggggaagccatgacgggggaaggagtcaaagatgttgctactcctgttgctccatccgggcaatgatggcctggatggcggttgtcaattgccgcgctacattgttgtaggctgtctgtccgcagccgatggggtcggcgatgccgcggttgcccgtgtagcaggtgaccagcctgaccttgttcgcatgttcggggaaattggcaagcagggcggccaggtggctttccgtcatggcgtagacatctgtggcgtttttcatcagttcatccgtaacagggcggctttcatggctggagagattgacgccatgctcccggaggacgtggagcgtttccggactggctgcctgcccgggccatgcggctgttcctgcggaaccggcctgccattccggatggtgcgcggaaagtttccggaacaggccttccgccatggggctgcggcaggtgttgccggtgcagatgaagaggatgtgcttgcgctgtgtcatgagtcggggcgttctcttttggagtgatgggggataggtacttcgttgggttcctgatacaagttgtccgggggcagcacatggcaagcgccgctgccttccgacgagggtgtgccgtcgtcttcttcatcttcatcctctgcatcgcgggaggggggggaaagctgggggaacagactgcacgccagggctacgcacagcaccgccgttacgggagtcatgacggggaaccatgtatcatgagcggaaaacaggtaccatgcaatgaacggaacgaacaggatacagaggccccaggtgatgaagcgtcctctgcgttggaaacgcaaagcccatacggacagaagcaggacatccagcacgatgatccattgtacccaggcgggggctatgggaatcaggacggcaggggcaggggcaagcgctcccatgatgctgcggacagtttgcgccgccagaagggattgcgcgtccggcgtgtcggaaagggcggatggttcggaaacaagtaccgcatccgcagaggaaagcagttttctgacggcagtagtatctggcggacgcaggccggacatgacggggacgatcacttccttcgtgtccagaatggtggggctgctgtttgccgccagggggatgcggccgtgtttatccagaggaatggagcgtttgccgcccagaaaaagggtgtctcccggaatgattctgacatcaccgggtttcaggtccagggcattcagagcggccaccagaggaagagtgggaatgatatccccgccccagcggatgaaaagcggcggggagaccctgttttccggagctggggaaaacagctcgttattttccacgacggttcccagggagggggctgacgtggttatttgcggaggttcccctacgaacctgtccgcgcgcgggaactggtccgtctttcctacgatgttggaagcgggaataatcaagtctttccaatccggcggaaggggcgagcggcgggcggattcgctcatttgccggcccagagccttgtggaggaagcggtccagttcataccccacggcggctttgacgatgctgtccggcttttcttcccaggtcatgggggacatcacgtaaacattcctggctccctgttcatacaggtgccggaacagcactgtgtaatccatgggattgggaggataggaggcgaaactgttcagtgatgattcccggtgcagggaaaccacgggaagctgggccgtctgccctttgttgaagtaatcgtagggctggaggacgatgctgttttccgtattcagcccttccgggcgaacagtccggtattccccagccagcaaatgttccgctgcctgttcataacagaaaatggtaggaggaagaagcacataccccagaatccagcccagccccagggaaatctggaacagggacaggacaagcaggaatttggggggaagcgtcatcagaggggctgggaaaaatcatgctagcatagcagccagcggttctgcaagcgtggagccggacagaagcttccgcaggtgtcccagcccggcgggaatctgagccagataccaggtttttccctgattgtggccgatattggcgtaagcgcccagcatctgcataatccgctgcagggcgcaggcacggaaaatgcggtgatctatggagtgagcggagatattttcccactccctgagcaattcatccgcctgttccggttccagacgggcgtagccgtcatagaccagggaggccagatcatattccggacggccgccgcgcatgccctgaaaatcaatcagccaggtttttcccgcgtggatatgcacgttctgagactggctgtcccggtggacggggcattccggaagggccgccagaaactgcgcctgctctttcagggcgggatggttcaggaaggaagccggttccaaccccaggtgggaccccaggaaatgttcagcaaaataggactgctcccagcggtacaaggcctcgtcaaaagcgggctggaggggaaattcctccggaaacgggcaggagtgaagcagatggagttgttccatagcccggatgtagcgcaggcgcagggaaggccagggttctttccggaaagccagcaggttggcgtctcccaggtcttccaccaaggcggctccgcatccgggaccgagaggttcataatcgtaaatttccggcacgttgacaccgtgggcgtgcagatgccgggctgcggggataaaagaatcattgtccgcacggtcatttccccactggatgccgatgcatgtgcggccgccaaaatggatgcggacgatcgtacggccggaggctcccaaagccaggggacggaaatcttcctgacgcggaataatgtgaaaactccggtgaaccagacgggacaattctttcatggaaaggtggcgtggctgcgttaagagccttgcgtaaggatggcgtatgaaggatgacggcacccttcatacgccgaaaatgaggaaaggcagggcaatcaggcggggaactggtggtcttccccatagccgtaatgctccacgacgtaatccacatccttgtctccgcggccggagcagtttaccagaatggcgcctcctctgttttcccgtgcccacttcatggcatacgcgatagcgtgggagctttccagagcgggaatgatcccctcgtaacgggaaagtttgaagaaggcgtccacggcttcctcgtctgtggcggtgacatagttaacgcggccgatgtcgtgcagataggcgtgttccggccctacggaaggataatccaggccgctggctacggaatgaaccggtcccggattgccgtcttcatcctggagcatgatgctttcaaaaccgtgcaggacgcccttgcgtccataggtgatggaggcggaatgatccccaagcctgggacctttgccgaggggttctacgccatagatatccagcgggtctcccaggaaggcggtaaacatgcccatggaattgctgccgccgcccacgcaggcgcagacggcgtccggcagaagtcccgtcatttccaggaattgttctcgggcttccacgccgatgcacatttggaaatcgcgcaccatttgcgggaaagggtgggggcctaccacggaaccgatgcagtaaatggaatcctgataactgttcaggtaagattcaaaggcggaatccacagcttccttcaagctttggaggccgtgcgtgacaggaaccaccttggcacccaggattttcatgcgggtgacattcggagcctgcttggcaatatctaccgctcccatgtgaatttcgcattccaggccgaagaaggcggcggctgtagccagcgccacgccatgctgtcctgcgcccgtttccgcgataatgcgcttcttgcccatgtatttggccagaaggccttcccccatgcaatggttgagcttatgggcgcctgtatggttcaaatcttccctcttcaggtaaatttgagaggtgcccaggtggcgggaaaggcgttcgcagtggtaaaccggggtgggacgtccctgaaactgtttgcggatgcgccgcaattcattaatgaactgggcggagtgagctatcgtctggtaggcttccgtaatttcttcaaaagcgggaaccagctcgtccggcaggtaaacgcctccgtattcgccaaaacggccctgggcgtctggaaaattgcgtaaataagtatggagatccatggtctgttgcgttcgtgactgccagtatttagcacgatgccacaattcaggcaaaaacaatctccccggaagcccttttaaaaaagaaaggaaagaaaaaggacttccccgcaacaggggaacggtttctccgggagagaccgggaggaaaaatcggaaatcaggccaaacggcgctttctgatggattttccggtatcggcaagcgtctggcgtgcgtccggatccgctccggccatcaaggctgccagatcccgaacgatgttctggcgcatgcgagctaccagatcgcgcccttcctgggtgatggcgaccatgattttgcggcggtctttggctgcgctcatgcgtttcaggtagcccatttcctgtaatttatccaccatgccggtagcggccgcggtagaatgccccattttctgggcaatgctggacatgctcagaaaatcttcgctggccagataagtcagcaggaaaaactgggggtaggaaaccttgccctcattcaattctgaagaaaggttcagaatgcaggaacgttgcgtgaacaggatgaaatccgccagcttgtttgcttcttcggaaatggagctcatgatcgttgtgaatgtatgggagggttgatagcgatacccgtccggagactcggcggcggttcggccaacctaccgccgcgtccttctgcgggcaagtcaaaaatataaattttttattaaattttacatttgcggataataagcattttgatggtatttggaatacaatatgttgactgttaatagaatggacatattctgaatatagaatgtgaataacatgttaagaatagatataaactattgataaactatagtttttcacaaaccttccgggaatccgcagcaaatctggcataaagaggcgttacagcatgacaagcctggattggagagggctcttgtgcagaggcctttcatgggaaataaaaccttgccggaggaaaattttatacagcgggaagcaatattttcctgcccttgaggcggacttggaacttctgcagccttgacgtgagagtagggaaaggggacgccgaaaacttcctttcatgacctccttcctgccgcgatggttgcggttccttgtttacggcggtattagtctatgacgcttgtaaaggcaggaaaaacctttttaaacggtcctggaaggaggggaaaagaacaaacggaaacctgccccatactgatggagcaagcgccgttacagacccggcctgggaatgacgctctgcttttgggagagaaaaattgcttcttccccaaaagtcaaaggcaggcggaagtaataggggaaaatgctcaaggagccggaaaaagactgccggggttctaagaggttacctgcaaaactcctattatccggaacggcctattttgaaaacaggccagtggcagtgaaagggccgggcgcatcaaccgcattaataaatgctccattacagatgacgcatcattggttatcggcacggtgtgtaaaagagcaattgcgccgtccatgttcatgttctgaaagtctgttatcaaatgttcacgaccatggaacttagagccgttaccattacatttcaatgatattggtttgctggggatgcgtggttcattaattttttcagtatttattgtttacgagtggttcttatgtcattcctcgctattccgcacaacggaaaattttgtgatccgccggcctgtttcctgaaaaataagaaagacggcgttgcttgccgtcccagctgccgccatacagcaactccagctgcttgcagcattgcaggcagaaaatcatggaataaagcattactgcaagcaacatcattgcatgccgtcaatcttatgcttgtatccgcaagatgttttattcccccgccattctccggtaagttttttctggaactcttttccggagaatggacggagaacaatagcaacaactagttggcgggaggcggcgtaaaggtgcgggctgacatatccttgtccagaaccagcattccctgtccttctcccttgatcatgcgtaatttgctgatgatgtccttgacgctttcttcctcttccacctgttcggtgacaaaccattgcaggaaaatatccgtggcgaaatcccgttcttccttggcaaggtgcaccagttcgttgattcggcgagtgacttcctgttcgtgggacagcgtttcttcaaaaatttcaagaatattggaccagtttgcatccggagcgtctatggaaagcattgtaacctggcctccgcgggaaagaaggaaatcataaaatttcagcgcatgagcggtttcttcctgatattgaatgcgcatccagtgggaaaaacctgtcagaccggcatcctgcagataggcggacatggccaggtaaaggttggctgaatacatttcccatttgatttgctcattaagagcagttgccattgttgtactgatcatattgtaaaatcctgttgattttccccacttctacaaaacaaagtccgcaggatcaagataatcctgcggactgtatgacgggaaggggagtaagggaaggcgtcaggcttttgcggaaacctcctccggaatattatcttcagggagttctttcgccggaacgggagggaattcctcagtttccgtaaccacgctgttttcttcagatgcttcctcccgggcgggcgccgcctcggaagaagaggctgccttctgtttttctggtgcagcggagtccgttgccggcgcgtcctggcccttctcttccggtttccgtttttccttgggagccttcttgggagaaggagcttgggcggagacggttcttgggcggctgacagtgttattggagaaaaccaggatatagccctgttcggacagccagagcagatcacggaccaaattctgctgtttttccatggcctgggctacttcttcttccgaggccttttcctgttccgggactggggccagctctttaagcatggcatcgacgcctttgccgggattattggccgcccaggtggcaatggacatcagggaatctgataagacggtgccttcttccatggccttggggcgtgccgggccggtgtaatggttgcctttccacttgaaaataggcatatgatgccgggctaacccgtggcaaaggttgggaatcagcatgctgggatggcggcgggtggtgccggataattggatcaggtgcgcccacagaccgggggagaggtgattctttttcacggctccgttgacgaacaccttgtccgtaacgtcatagcactcgtcaaagtggttggattcgaaatcctgttctaccgcggcgggagattccagaagcacttcggaggctccttcccgaacgggcttccaggcggtgcgtttggaaacggcttcctgccatgcctggacagcttcttcgctcttgtccgtcacaatcttggaacggaaagcctcaaaagtcatgttggcaaatttggtgcgatgcaggttcatcagggcggactggtagccgtgccaattaacgggacctatcagctcgttgtttaaggaacatttggcaatggctttgaaatctccttttggagcttccacttcctgttctacggattcgtaatatttgggcatccaggtggactgccagaggtgtttgacggcctcctgtcgggaaataaagcaggcgccgtcgccatgcttgcaatggtacagatccgggccgttttcctgcttcatgaataccaggtcataacggtcgtaggaacccatgaccaccttggcaaggtccagcagggaaatggtgcggcggtgtttctgtacttcctggtgcagggcagccaggccggaatccacggggcgcagctccacgcgcaggccttccgtcggttcctccatggcggagcggggagtttgatcgcggcggttgcggaaggagccgcgcgtgcggtcttcccggttaaaccttctttcgccgctttgaccgtcaacacgacgttccccccggggctggcggccttcacggttgtcgcgccgcggtcggcggtcgcctccctgcctgtcgccggacctgcgttccgggtaggatacaggccgttcctgacgggctcccggtctcgcccaggccggaccaaattgaaagtcggccaagccggaaaggtccggaatctgctgcttggggtctgtggaaggagtttcgtcggtcatcatgtacgggttgtttcaatagcaactaaatgaggtggatggcaatcattttacgtgcaaacagaccgaaaattgttcaaaatgtcatgaaaggcatctggaaatgcgactatttccggtgtatcctttcaactcaacttctgtcaaatgctctatatggataaaatacgtcaacgactttccgaccttggttacgccatttatgatgctcccgctcccgtaggctcctatgtgcaatgcgtacgcacgggcaacctgcttcacctctccggcggcatttccgtgaacggggacgacaaatactttggcaaagtagggcaggagctgacggtggaagaaggtcaggccgctgcgcgcgccgctattttgaatcgtctggccgttattgtgcaggcggtagggtctctggaaaaagtatccagaatcgtggccgtgaacggatttgtaaatgccagcccggatttttatgaccatcctaaagtattgaatggcgcatccgatctgctggtggaagcctttggagaaattggccgccacagccgtacggcggtaggcgtatccgccctgccgctcaatgtagcggtggaaatcagcatgatggtggaagttcgtgattaatatttaaaaaccggaagggattcgtgcttgaatcccggcggcattcctgtagagtgccgtccggtcaatgccctcgtggcggaatggtagacgctgcagacttaaaatctgttgtccgcaaggacgtaccggttcgagtccggtcgggggtacttctttaaataacaatgaattatgtaaattaaaggctcgcttttggcgggtcttttttgttttcaaatatgctgaatttacccctttttgcttgtatctccggtcaaaaatagttacccagtagttacccgggatggaagagaaacggaaaaagaaagcggctcctttgacgcctgtaaaagatgtttcccgtgaaaagatggggaaagcctgctggcgcctctcaattcccgcctccttttcggaatccggaaagagggaacagcggttttatccctcctataaaaaagcattggcggcggccggggaaatcaagcttggaaaagtggctgtggatgccgggattgttgaattaacccaagctcaggcggtagaagctttatctgcgctggatattttggagggctctggaatagggttggtggatgcttgccgactcgtgaaaagaatgcaggaagccgggataggagatatagccgaaatagaacatgctttcaaattgggagccgcacagatacggcatgaaaagaagtctccttcctggagtgaagccgcttgggaaatggttcgtgtgaaggaaaaaatcacaaggcggcgtgagcgtaccttgcaacaaattcggtatatgattcgtcgcatggagaaacgatgtcccgatttttgtgtgcgccccattggaggcatcacaggagaggaatgtcgtgcggcgtttggcagggcttttgattcaccgattcagcaggataaagcgagagtagtcttttccggcgtctggacgctcgctatgaagcgtggatgggctctttccaatccgacccgcatgcttgatgcgttaaagacgcaggagcgggaaatcagggcattgacgcctgaagaagtagaacgattgctgctcgcttgccgaccgcctttgccggatgattcttcccagttggatttgacatccgttcaacctgccgtggcgatactcgtttttgccggcattcgcccagaagaattgatgcggttaacgtgggaagacgtatctttcgaggatggcgttattactgtcagggctgcagcttccaaaacagggggagcaaggcatgtgacgatctgcgaggctttgcgggcatggttgtccctggttccggggaaggaacgcaagggggctattattccggaatattggcgctcccggtgggaagcagtcagaaagcgggcaggatggggaaagaaaaagccttggcctaaagatgtgctgcgtcacacctttgccagttaccacgcgaaaacctatgcggattttggaaaactccaaatggaaatgggacaccgttccgccgaattgctacggaatagatacaccaatatggttggacttaccggagatatggcgaaacaattttggttggtaataccagaattaggtaagtttaattaaggtgaatcatatatcttatttttcggaaatttatttttctttttcagtaggttccccgattgctaaccaactaactcgatagccataaatcaaattttggctccatgttctaaggttgatgacgaatccactagtagagatatgttgtgctgctacatcatatctattgacagtatgtaaaattttttcattgttttcatttgaaaaataagaattctctataaattgaccttcatctaaactctctaaagtaagtattatatccggattatgtttaaaatgattttcgaatgatacttcaattaactgggagcgaacagggtttctaagtaatgactgaggtgaatatactgttgatttttgtattaaaatattaccttttatttgtgatgatgcattttgctcaatggtaaccgtagaaccttcatttgctaaaacagaagttgctgtagagttttgtatagatccaattgtttgattagctttatttgttccggtaggattgggaaatagtaatgtgataaaaggagctataaaagtggatatagatgctaatttaacaacaatatctttatgtgattcagagaaaaaggtaagccatagtccgaatccccatagtaatgcaaaaattactatctttgtagaattactcatttcaaatacttggtttttcattatgtttgtagaatattattattattttatggtttaattatatgttttttgttttaagcaggcatatttatttttgagatgacccaccacaaatcttgcagttcacactgctgggtgtatcgctggctcgtcctttgcaagcccggtagtaccggcagtttttgttatgggtcttgcccgttgagctgatccagtacgctttttctttcgctgccggtttggctgccggtttccggtggtagtgatattcccctgttttgcggttgtagtgaccgccgttggcgtccaaaccgccagggtgcgcttccgagaatgaagtgagggaaataacagctaaaatgagagagaatagtttcatacaaattcataataccatgaaataaagagagttgtaaataatttgcttaactctttcaacggcattatgaaatgattatttccaacattttaggagatatttccttctcgactctaggtagcagtaacaaaaaagcccctggcccggaggccaaggggcgaagtgttctacgattcttccatcttctttcttacccatttatcaatatctaccacttcaccaggtttcaggtgcaacgcaatccacgcccggaggatggtgttttccagttgcagggcttcaaaacttcccgcctgcactcctcgaattactcccaggggttgtttcacctcccccatcagttctccaatacgtactcgtgatttggcagggatagaacgacgtgacgacatccagccatagaccgtgtgaatgctgactccgcattgttcggccaaccagtcacagtcttttccattttccttgagccatttcttgatgtcactttttgagtgcattccccagaattatcataccggaaaagggaaaacaagaggtgatgcattcaacaaaaaaaggagctgccccgatagaggcagctcctgaatatagtaaagggaggtgttaatcttcccaggttccacctgcagcttcaatagcatcccgtacctgagctgtaagatagtggggggcattgtcattatcgtggcccgggatagtcaccgtctggccatgaggatgatcgtatacacgatgggaaccccgtccttgtccttgctgcagaatgaatccggcatttcgtaagcgtctaatcagatctcgtattcgcataagtgatgttgaagatacgaggagagaggagagtttcaatggacgctgtccgaatggaagaatcagcttatttaataattgggttgctttggaaaactaagatcgtgattcctacttggcatttactatcaacaataaatcgttccaagcattcctttggtcagtaagaaaacagtatagttatatcaacttagcataaaatttcacctacaaaatatagtgtattagctttacacacggatattgctttcataacgaatgttagtatataaaatgttatttttttagataatttggatctaaaacagtttctattaatgagataaatatacaagctttacaatatttattataaatttcctctacggtagtatttacgtcggtctctgcaaaatttttgtggactaataagtttctttgttgtccaagctcaaggaagcttttttctgcctcttgtagttgttcatcgttttttatttttattctaacatcgttttttgtttcttctccaaaaaacttccaaaatttatttgtattgccactatcccaatcaaataatgtgtggtattgtcgttcaacagcttttgatttaacaagatgtacaatccttttatctgttccacaagctttctctgcatatcctgatatcaactctgaaatcttactttcaaaatagcttgctgctgataaaactaatacttttttataaacatcatctatgtatgaagcaaaggaaattttttttttttctaaaagatattcatataaatcttttgaatcttcgtattggttttttatcctttcgctttccatttttaatcatcgttattgactgattcaatttcatacagatatttacgagcaagacgtaatcttgtctttacgctctcaacatgagaggtactatgagtaatggcttccttaaaatcgttatcctcttttaaggcatcaaaattttcttgtttgattgctgcattatcaactccttgtgctaaaattctttctgccacggtgacaaaaacggcatcaaaaagggatacattaaagcttttcgttttcgttagaaaatcttttttatcaatagaagcgcatattttcaaaaaatcaaaaaagagagcctcgcattgtgtaattttgtttgtgtcaaatgtttgggcttcctttgaaaagcgatttaggaaacggatcattgaaccagaataagatgccttattatataacaaggcatatgagcgcaataaaatttctatatcccggaatttgtcgtcttcttcctttttcccaatcaaatttctccaatcatcttttgagtttaaattgtaaatcagcttatagaagtcagaacgatataaacaacctctaatttcttgcggagaaaggtttaaacctcctgtgtttagccgactaaaaatctcgtatattgacccattatcttcaggtttgttttgccttatggacatgcatctgattggcataaggtcaaaagagcttttctgtgcaatatctaatgtttggtattttttgttatttaacggatgcggttcaccattttcttgtttagcaaattgcaatttaaaatcttgaaaattttcgttgttcgataagatactatcagggatatggccattctcatcaaaaattttacggagaaatgtgcgtttgccacttcttgggaatctttgttttataaaaaaataaattgttaaaaggcgttgctgtccatcaataatgtcatatttattcctctctctttgatataaaaaaatctgaggtatggggagtcctagaattaatgactctataaatctggaagcacgttttctatcccacacatagttacgctgaaaagtgggcattgaaattacaccagattcgataaggttatttattgtcataacattaaagtcattaggaataacactaatatcatacgaaatgacagatatttcttcatcttgtaggtcgtaataatcagacattgtaagtttctccttttataagttgtcggattgtatccataatattcatggctattccctgcgataataaaaccggtactccatttccaatcatcttaaattttgatgataatggtaaatgtgcaggaagtacgaaatcggcaggggctgattgtaatgctaaggcttctgctacgctaattcgacgcattttgtatggatgaagatgtacttcattatttccgtaagcagaagtgggtgcatatcgccagcggtgaagtcgcttaaaagatttgcccattgttgccccttcataaatattttcatacttatgaaatacttttactctaaatatatctttcccatttggatgggtttcaactttatttttattaaaccaaaattcaactgtaagatcagctggaatccctttgggacaatctaatttgttatcaatagaaaatggagatgtaataggccagggcaatgataaaatattatctaagttatattttttgtgagaactggtaatatacgccatttttcttccaaatgttttagtagaaaatccaattaaaaataaacgattccgatattgagggacaccatattctaatgaattttctattgagtcgaacagtttataaccagatttttgaaattgtgttttaatttcattataaaattttctatgcttttttgtttgataaagccctttaacattttcaaagacgaaaaaatctggatttctcttaatgattaaattagtatatgttgaagtcaattgaccatttgcaccatcttttcctatgttttttcctgctacagaaaaatctggacatggtggtccaccaatgaaaccgattagctttttttctcgttcgtcataagttgggaatgaatgatgccacacatcatccgataggtattccctaatatctctatcactatatccataaacaggcagatgtccactatttttccgtgcatactgatatgcctgtagaaaccgtttgttatattcgtttacgaagacgatattgaaccctgcattctcaaatcctaaatctaaaagacctaatcccgagaaaaaagaaaacacttctacatctattttttccactcccataataattcccttcgctcaacctccattttcaaagaagaactcttgtgtgaacttcttgaaactacttaaactttctcccagcgttccagcgtctccacgtacacgccggagattttgccgccgtccattggttcgatgtctccgaaggcagggttgatgggatggagggtgtattccattttgccggtttccgggtttttcctgcggaccagttttttgagcgtcaccccgcgttcatcatggtattgaacaatggttccgggtttggggatgggggggatggtgtattttttcatgatgactacggagccgtccggaatggaaggttccatagagtgaccgttcacgcgcagcaggtattcccctttttccagttcacggtatagccggatgtcctgcgggatggtgtctccatccgccaggttgccggcggcaatgttgccgatgatttgtccttgggctttcaaggagggggctgtaaatgtttctactggggtaaaatttcttacgggcggcttctttttctttggcggcgttttgaatggcggtattgacgaattccaagaaggtttctttgtgggctttagcggcctcacagatgatgtcccattcttcatctgtgaagtcgatgacgatgcggggagaggattcggcttctccgttcatcaggcgttgaataataaggatagcctttgcgggaatattgatggatgacgaaagccaattatctacctgacgcttggaaactccacattggttagcgagccattctctgtctctaccaataaccttgagccatttttttacgtcttcttttgttgtcgtcatgcattgatattacagcattttactgatatgtcaacaccttgtcatctagtgatttcagtataatgctgaaaatatatcttgaaatgttcagttatacactgtaatttgaggccatcagttacggaaatagatgaaaacagaaatcgacttagacaaattaccggacggctgcaagagccatctgctggccgaagcggaagaagggttgaagccttcggaggctattatccgcatcattgaacgagaatcattccgcaggggattccgtgttcacctgaccacggccagtaaccttcccctgcctcggaagatctcaaaaaaacctacagcataaattatcttaaaaaacatttaacagtaaagaaaatagaaatgaaaaatcatattgacaaagcaacaaagggcaagatccggaaaatgctgaaatttgaagtgaaaaatcttcagacagaccttacggaaaaagaatgggaagaatggggccaactcacggacgagttacgcaaggaaggcttcaacatgtcaatgaacgggaatcggtgggagatcctttttcacaattattcgtattttgcggatccgacatttgataaggatggtaacttgaaaggtttttctttgtcaatttaacataaacgccccagtgcgaagaatttagccattaaccgttcaaagccgaaaggcaggggcatcatcaaagaaatctacggcctaatggaagaagccctgatcgaagaattgaagctgctcggctggcacgagctttaacccaaaacaacaatgaaaaaaatgacgaacgaacaatactggctgcgccgcgaccgtgcctcgaaaatggaattcctgtacggttgcccgttgaactttccggaaaacgctctcaagccccggcccggtatcgtacagaaccttgtcttttccgctctgctggttggtatcttcacgattgtttattttatttacattaacattaagtgattatgaaccaagaccatagattgcctgaacaagtggtcagagacatttcaaaaagattggccgatgccctgtctcaatcatggcctaaaaacgccgatgcgacatttgccggggttcctcaaatcaatatcaatatcactgctcccccgttgccgtcccggctggtaaggctctccaagtttgcccaatgcggactatttgccagaggttctgaaccaagccgagctatgttggaaagcgccgacggtaaaaaactgcttccgattgtcaaatgtggcggagtgctttacgtggacctgaatcgggttacaaccgccattattgaacaactctctgatacaacgactggaaagcgctaccgcaaaaccggctcgttcaatgcaaatctctaactacctgaaaaaagatggccggggccagcaggaactgacacccgacccgaatacaatcaaacaagacaataatatgagcctattacaaaacatcaagcgcggagtgcagcagcgtccgcagcgtgtcatcatctacgggccggaaggcgtgggaaaatccacgctggcagccgggctgcccgcccccctcttcctggacacggaagaaggaacccagcacatgaatgtggaccgtatccaggtagaccactacggcgccatgctggaagccctgcaggacatctacaaggaagcccggaacggaagcctcccctaccggacgctcgtcgtcgacacgggagaccgcctgtgggacatgtgcgcccgccaggtcatcagggactacaacgcctcccccaaagacggaaaaatctcctccattgaaagcatcggatatggaaaagggtacgcccaggccagcgaaatgttcgtcaacctgctttccgtctttgacaactgccggaacgcgggactgcacattgccgtcatctgccactgccgcgtggaaacggtgaaccctccggaaggggaagcctacaccatgtacaccatcaaaatcaacgctccggccaaacaggccattaccgccaaggaaaaactcaaggaatggggggacgccatcctgttctgcaactacgtgactaccttcacggacggaggcaaggccaaaggcggagaactgcgtgccgtctacacggagcaccgggccacctgggaagccaaaaaccggcacgggatgcccgcggtcatggcgatggacgccgaggaaatctcccgcctgctatttggaacgggctgcggaccttccgggaacgctccggtaggcgaaaaacaggagcctcttcccgcacaacaggaaaaaccggctccctccctggcggaccaactggccgcggtcatcaacgacgtgccgggagcgctgaacttcctcgtgtacaaaaaggaaatccagccggggcagggccttgaagccgtctcggaaaaattcgcctccttcatcctctccgcccccgaccggttcaacacggctgttctgcagcacaacaccccgaccgcccgatgaaaaccgtctcctgcatcaacgtcgcccgcgaaaccgggcatgccgtcctctccctggacggagcggaatacgccgtcagcctggacgacctgcaaaaaatcctcgctgacattgccgggccccgtccggccccggccacggaactattgaggccgtccctgctccccaagctggcgcaatgcccctgctacgtctcctcccccgacgcgggagaagcggcccagcggggaacccggatggacgccgccttccgggccctgctcatgggcgtggacgaattcagggcgtgtgaacacctgaaagccgatgaaaaagaatccatcctctgggcggtgaaaacggtccggacgctctgctccagcgaagaagtcattgccgacaaaaaccgctgcgccttcccgcaatggcacccccgcgtgacaggcggggaagcggactgcctctgtcccgcgctcggcaaactcttcgacctcaaaagcggccaaatccgcaactactgggaacagcaggcctcttacgcgaaatccttcatggaacgggaattcctggatgaaatcacctgccacctcctctactgcgaccagcagcaaatcgtcacccggaaattcacctaccgggaagccatctccatcgtcaacggagtggtggacaccgtggaccgcggcggcgggccgcgcctctgcgactactgcggctggtgcgcctcgcaggacacctgcccgctgcggaaccgggcggcgcaggaaatgctgaccctggcggaagccggaacgctggaagaaagcttcgccgaaatcgcggaaaacccgtccaggctggcggaattcgtcaccaaggccggaatcttggaatcctatgccaaaaaaggaaaagaaaaaatcctcgactacctcaacaacggcacggaagtccccggattcaggcgcgtctcccggaaaggcacggacaccgtcgctccggaagacgtcgccaaatacgccacctggattggcgtgccgaaactcctgaaatcttatggcccgctcaaggcggacgtcttccgcgccctgttcgcggaagccctgccggaacaacaattcccggaagaactggtcaggacgggggccggatcctcctacgtcaaaaaaatctccgtctccaaaaccacaaccaacaaataaccattatgtttagctatatttcagaaggcgagcccggcgaatacggattcctccccgcgggcgtctacgaaggaaaaatcgtcaaaatggaagaaggaatctcccagggagccaaaacgcggggatgcccgcagctggctgtccacatcagggcctttggccctgaaggggcggcgacggtgcgtcactacctgaccgcctcgaaagacctggcctggaaaatcgacctgttcgtcaaaaacgtaaccgggaaggtatttgaggcaggccagcaggtcatcatcaacccggcggaatacctcggcaagccctgctacgtccggctcagcgtcaaacggggagacaagcccagggcggacgggagttatcccgaattcagcaactgcgaagacgtgctggggccggacgaagcccgggccatcatggcggcgcaggacaggacagcggcggggcgcggcggagcgcccctgcctccgcgcccggcggacctgccggccaacaaccacatgagcgccacggcgggaccgctggcggaagaagacgaaatccccttctaatcaacagccatgaacaagccgataaccatcatgctgccgattgttcccccgacgaaaacgcaccagaacaaaaaaatcgtcaacatcgggaaacacgccaaactggcggacacgaaagaattgaaactggtcatcagcgattacctgaccctgctgaaaccttatcaaccggcccggcccctgacggggccggtctccctgaagctggccttcgtctggccctaccgcaagagcgagccgaaaaaaaaccggatcgggctcattccgaaaacgaccaaaccggactgggacaacctggccaaaaccctgcaggatgtcctgacccggttgagattttgggaggatgacgcccaggtgtattccgcgtccgtggataaatggtggggcgaagaaccacaaataacaatcactgtgcaagaaggatcagagcaatgaaacggaatcctcacatcatcgttcagcaggtttgccccatgaagaaaaccgacgacgggaaatacgaagttcaggccgcgattgtacaccacaaaggaattatcgcccgctatcgcatggagtaccccacgaaacggcatgcccggtgggcgcagcaccttatttgcacagtgaaaaatgcttcacgcctccgttgttctgatgaacttaaagccttgattgaggaaggaccccgatgaaaacgcctaaatgccctctttgcggcacacctttgaaagccatacgaggatatgatgcccatgggataacaaccgattgggttgctggttgctacaactgcttcttccagagttcccatttttggaaaaccaagaaggcatgtattgaagatatggataggcttgtttccctgttccctcccatcatgcggttgaaacccggcgaccttattaaaatcaggaaattacctgataactttttcgttattaaaacagatgttgaaaaaggagtaatacgcgctggcagcacttatgggtacagcatgtcttatgtgccggaagatgttgaacaatggccctgggagcttgagcagaaaggaggaagcaatgatatttgatattgcgcaacttatagtttttttagccaccgtcgccgcgtatgggtattacctttatttgattggtaaagttaaagggcttcttcaagcggttaatgtcgttcttttacaaagaaaggaagaaaatgaaaatgacgcctgaacagaaagcgttttacgaatgcggaaaatccgtggagtccgtcagggaaaccattcagaaaatccggcaacacgccattcatgaatttggagagccatattaccttttgatgccctctgaaaaaaggatcttaagaatggcaacggaccttgccgggaaaatccataccgtccgccagaaacgggccgcgtgccgggcgtgggtgcatcctatgcgacggagatgttcgaactgtaaacatgagctaacgcagtacaagttctgcgcagcctgcgtccatgaaggatggcctgtttactgggagccgagaaaggagggggaatgaaagccattcttgacgcctgctgcggctcccgcatgttctggtttgaccgccgccatcctgacgtggtgttcatggaccgccgggaggaaacgcacatgctttgcgacgggcgaaccctggaaatcaagccggacgtcgtcggggacttccggaagatgcctttcaacgacggggcgtttcgccttgtggtattcgaccctccgcacttgattcacgctggggaatcatcctggctggccaagaagtacggaaaactggaccagaaaacctggagggaggatttgaaatccggcttccgggagtgtttccgggttttggaaccgggcggcattctggtgttcaagtggtgcgaggatcaggtttcaaccgcggaagttctgaaactggccagccatgaacctttgttcggacaccgccgcgggaagaccgtcttcctggtctttatgaaatctacaacccccaactgacgcttttttgattatggaattcatcaacatcccaacagccttgttttccagccccgaatatatcggggcggaacccatacagcgcgccacctggatctctctgctggcctggtgctgcgaacaggaaaacggcggcatcattgagggctgccgctcctggagcatgcgccgctggatgcagacctgcggcgtgacggatcaggaaatcagcgtggaaaacgaactctaccactttgacggcgacaatctcatcgtattcggatatccgcatgaaattcaggaaaccctgaaaaccaaaaggaaaaccgctcgtgaaaatggaaaattaggaggccgccccaagaaaacccatgttgaaacccacacaggaaccgacgtggaaaccgaagaaaaacctacgtcggttatttcagaaaccaacgtaggaaccgaaataggaaccaacgtagccccctatgttgaaacctatccgaaaaccgtaagggaagggaaggaagggaaggaaggaattcacccccttaccccctctccgtgcaccgtggaagaagtcgaagaccatcttcgggccgcggcctttgcggggcgtgtgcgtttaacccccgaccagataccggactgcgccacagcctactggggaagccgggatgccgtcaactggacccgcaacggcatccccgtgaccaaatggcaatccgacgccatcagcttcgccacctcctacgccgtcaaccatccgccaccccctgggaacggagacaaagacccttacagcaaccttgaagaactttaacaatcaacaatttcaaaaaaacatgatcgactctcagacactcatcgacgccgaaaaactggtgctctctcaggcaatggacggctcccaggcctttgctgacctccgggacaagggcatcagccgccagacattcagcctcccggcgcaccagcaaatctggaccgccctggaaaccgtcgccggcacgggaggaaccgtggacgccctcaccgtcatcgcccgccttgaagcccagggccagcttgacgccgtgggaggacacgccggagtcgtggaaacggccacctacggagcccttgcccggtacaaaaccgccgccgccctggaaatggtcacggaagccgccaaaaagcatgcgttgctcgcgtttgcctcccggatggcggaagctgccggcgatcagctcaaaagcgcggaagaagcccttgatgaagccgagcgcggcatgtccgccctgcgggaccggtgcggcgtccgccagaccgaaaccatccgcggggccgtgggagccatcattgaaaacctgcaatggcgcatgaacaaccccggagccatcaaagggatctcctccggataccgccgcctggacctgaccctggacggcctgcagcccggcgccatgatcgtgcttgccgcccggcccggagtcggaaaaaccgccgccctggtcaacatcctcaccaacatctgcctcgggggaacccccgtgggcatgttcagcctggaaatgccgaaatcccagctcctggaacgcatcctctacggcatggtcagcatcaactccgacgacatccgccgcggcaggccgatgacggtcggacagcagcagcatttcacggccgccgtcagaaaaatcacggccgccccgctgcacatcgacgacgaaagctcccttaccatcgacagcatcagagcccggggccgccggatggtccgggaacacggcgtcaaatgcatcggcgtggactacctgcagctggtgcgctccacgacccagcaggcccggggaagccgtgaacgagaagtctcggaaatctccgcaagcctcaaatccctggccaaggaactcaatattcctgtcctggtgctggcccagctcaaccgcgacgtggaaaaaagagccgggaacgcccagggcaaaccggtcgtttccgacctgcgcgactccggctccattgagcaggacgccgaccagatcatcatgattcaccgcccctacatgtacaagcccgacaagcacgaccccacggaagcgcagtggatcatcggcaaaaaccgcttcggacggctgggacgtattcaattccgctggaccgcggaactcacaaaatacgaggaaaaacagaattatcccgtcaccaacaaatgagaccccccaaaccatccctgcgaaaaaacaagccgacgcggcgaggaaagcccggatcctacaaactgcgcttaacgcttctggtggatcccagaaagaaaggcaaacttgtcgagctgggacttggcaccaacgacagacaggaagccgaagaacgcgccaacagcattatcaatgctctggaatccgccggactctaccgtcttcccgccgtccgcattctggaacatcacgtagcccaatttggcaagattgaacctcccccctttgaacatccagaattgcctctatggtaacacccctggaaaaattcctggcaaaacatcccacaccctccggcatggattcaaaggaatgggctgctctgaacgctgccatgaaggaaaacaagtttttctcttccaaggtggagaatatcagattgctggaacggctgcacaggttgattaagaattatctgacaggagaaaaggagactttacccaatggggaaacggttatcaaggtaggaagcgccgcggacttttccaaccaggcacttcaatggctccaaaccgaggggcttgttccaccggacgccgaaggcccgaagtatcacaacgatattaaaaacatcggtgctctggcccgtctgaagctcattttcaagaccaacgtccggcaaagcattggggctgctcaatgggaggcatccatgaaaccggccaatctcaaagcatggcctgctttccggttcatccgctttccgggagccaagacaaagcggcttgttcatgtcgtcaacgaagatgctgtccggcttaaaaccgactttactttttgggcagacgaaatgaacgccgccagcctcgggggctttgaggtcccctggccgccgttcggcttcaactcctacatggatcaggagcctgtttcccgggaagaatgcgaacggctgggactactcaaacccggggagccgttgaagcgtccaaggggtgcggagcgcttcgggattgacctgattgaacggtacgggtacggcaagaaggccagtacggcgaagttgccggaggaactgaaggccaaattgaaaaaggtctatgaagaccgctggggagtcaaacaggacaaatctgatgaggttgtctttccctcacaggaagtggcgaaaaaggccaaggaaacggcggagaaagtcatcaaggttccctctgctcccattcctgcgccagtctcagccgtcacgcacacggtcagcctgggagatgtccccaaggtgaagatgcctgccccgttgacggataaggaagctgatgaccttttgcgaagcgttaccggggaagtgtgggcaaaggcatccagactggaaaagaacgctttgttttcctacaccggaaatggatatgcccgcatcaacaacgatttgaggaaggggaagtccaacgccaaggcgaaacagatcgccaaagtcattgacagatgcaaagtgcctcaagacatggttgttttccgtggctgtggggtttacaaggaattgaaagacgctttgaactggaaaggagaagaaataacagacgagctggttgatatgctcaatctctccgtagtgggaaaccctctcaaagacgaaggtttcatgtctgctgccgtagcggaggggaaaggattcatgaaccgtcccgtgttgttcagaattctcctgaagaagaaaacccgtgccatttatgcagagcccttttccagattcggggcaggggccggtaaggactgggacggccttagcccgcaaacctattttagcagtgaagatgaaatcatcatccagaagggaggaaccctcaaatttctccaattccataatcagaacgggaaattgatcattgactgtgaattgatacaataatgatatgaaagaagaaacatcaccagcgcacaagagaatttgggagtctgatttcaaaggatgcaaaacatcccaccctctcctgatgaaatgccttttgtgctccaagaagaagctcaacccgggtagtatggaatgtagcgcttatgagcgtaaacctgatagtatcctctacgataacgcggactgccccagctttgaacgctgtattgacgcggaagggctgcgctggattgaaggatatgtgaaactctccggaaaggcgtacgttccccgccaggacgatatacccccggcagggtgggaaaaaatcaacaaggagtatgcgaaatgaagaaagagaggaccgggaagaagggaaatgtttccaggtatagcgctgccctctctgaacgcatttgcggtcatatacgttgcggggatagtctgaggaaggctgccgaaaaggaaggcattccccatcccacggtgatgaattgggccagagagaacgcggattttgcaaaccaatacgcgcgcgcgtgcgaggaacggcttgccgccctagaagacaagttgcttgaccttgtggagaaagggcatgaagtggccccacgtgccgaaatagggggaaccatgctgcaggcggtcaagttggaaatagacacgctcaaatggatgcttgccaagctgatgccgaagaagtacggagaccgtgcggcgctggctctggaaggtggagaaaaaaacgtagaggtgacccataaacttccagcagaagcaatcgttccgttagtggcagccttgagagaaatatggtccgaagaggaagaaagctagggcctcctgtcaggccggaagattcccccgtcatctttgccgccgtggtgctgggggaaacggggctgtacaaatggcagatgaaggctcttgaacgtgccgcccgcggcaagcgcgttgccctgcgtgcagccaacggatccggcaaaacggataaagtgatcggcatccttgctctgtggttcctgtggcgtttcccccgtgggcgcatgcctattacgtccggctcatggcgccaggtaaaaaaccagctctggcctgccctggaacggcaccggaacaacccatcccttgcgggctggaaatggctcaagaattgccgcgtggaaacgccggaagggggattcatcgaaggcttttccaccaaccacgccgggaaggcggaaggctggcacgggcgtgtgacggacgaattcaaggatgagcggaaggaacaggaggaggaagacccccgcagcgagaagaaagcccgtctgtttgacgttgacgagtttaccggggatgatccttcttcccccgtgtttttcgtggtggacgaggcaaagacggttcctgatgaaatctttgacgccattgaacgatgtacgcttcaattctgcatctacctttcatccccaggcaagccggaagggcaattttatcgctgtttccacgaggaaaaagaactcttctgtccgatggtggtaacggcctttgattgcccccatatctcccaggagcgcattgaccgcattctggcccgtgtggggggtaatgaggatgattcctattaccgttccgtcgtgctggcggaattcacgctggaaggagatttgtacatcattgaccctggaaaactggaatggggtcagcggcagccctacgagccgcgcagggggcgccccgtggccttcctggacattgccgcgggcggggatgaaacagtccttgccatctgcgacggaaacgaagcttggattgaatacgcggaacgacagcgggacacggtgcagagtgtccgcaagtgcattgccaccctcaaggggctgggcattgcggattgtgatttgtgggtggacgctccgggcatgggcctggctgtcatcagcgattttaatgaatcaggttggtatccgaatgagttctttgggaacaaccctccggaagaccgcgaccgctacatcaatctctcggcggaatgctggaatgacgccggactggaactcatgaccgggcgagtgcatatcaggtccaggcggtcggacaagacgcttttcgtgcagttgactacccggaagaaggaatatgcggacgattccaggctcaggaacgagaagaaggagaaaatgaaggctcgcaacctgtcttctcctgatcgcgcggacgccttgctgggggctatatgggcttcctttcgtggagtttccggagtttggacaggagagggcaacaggcccattgtgggcaagagtcagcacgccgtcaaacatacggggaaattttatcccatttaggactgttcgtagcccattttgacattgttgtaccctccctcgcgttggggcgataatgcgtgcatgaggcaagccgccaactacaacgtacacgccacggaatccctgccgcagtctcttgcgctgcattttatttctccatccggtgaggatatggacatcagcggcatgacgctccgcggcgcggtggtacaggatggagtgatcatgctggactgtgccgttacgggggcaagtacggcattggtgacatggccgaggctggccgccggatgcggcgcttatgatatttttctgaccgacgcatcgggaaaagaataccccttgttgaagggagccgtgcatgtagtgtctcgcgttacgcctccagatggaacggaagatgccgcggccgtagctggtgcacttgatgtctccatccccgaaacggaagacggctccgtaaccattgtggaaaacccgtccattgtggtcgaggaacttgtacgacaggccgaagcggctcgggatgaagcaaagcggcttgtggaaactctgggtgaacaggtggaaagcggggaattggtcaatgaggctgtagcaaataaattgccgggtgcgctcaaggatgcgggagtggaattggctgcggcaaccgggcaatccaccttgtccagcggggacgccgccgacacctggaccatcgtcggaggctacgcgatgacctggggagacgagattctggccgggcatctgcccgacagctgccgtctgaaaagcatttcaaccgtgtattttttcaccgacccggccctgaatcaatattgcctgcgtgtctggcggctgacggacggcgcttacagcctgatcggcacctccgcctatgtgtccaacctgtccagcggccagacggccacgtgggtatttacgccgggcgttacgttgcaacgcggggacaagatcattatccaggtatgcgaagggaccgagatgacgccctatgccttgggtatgcacgccgtgcttactccgtccgtccccggacgcggtttgatcacagaagtggtaaaccctcccaccgtgaacggcacgatggccccgctgatgaccgtggtggtggactatgacgacggcatcaccctgggagggatggaactggctaccgcgcggcaactggatagcctggggagggatgtgcggcaatcttccgcgactgccgaggctgcggcgcggacggctggccagaacgccgccacggcatccacggctgccgataacgccgcaacatccgccaccagcgcggccaactccgccacagaagcccagcaggcccttgccgccatcccgcaggtagatgctgctggtaacatgacgctcgctggcggtctgactgcgaacggcaccgtcaatgccaacggcggcgtcaacatcccgctggccgtgggagcgccgacggatacggcagcggtcaaccgcctgcatgccgcaggcttggccggagtgacggacattttttcccagcacgcctacctcaacacgggcagcattacggcgacagggacggcggcaactaccgctctcattcccggccagtatgcgcaggttagagtgcctgccgggactcacagcacgattgtctttcccttcacagggcctaacggtcaacataattattccaactttgcgggattctccattccgtggcgcatactcggcgcaggcaaaattaccataggcatcggacgaggcagcaaaacgacaagatctgatttaacccagggatcgtacagtattatccctggcaataatctggcccacaacagcggcgaaattctggacatcacatttgataatgtacgggatgcgacccgcgggggctacgtggtcaaggtgcgtgagatttacgctctttccaaggcggcagggtggagggtgaaaactactacaagttttgtgcccgcgacgcataacgagcctataccttcaatcgttaataaaattatctatcatcaacgaacccagtacaaattcgagagcgaatatatttcgtacggcagcctctatttgctgacgggcggagggcagacggtgcagctgcataaaatcgcggcggtgcgcggcgttaatgcctttgaaacgggcttggggattagttcgatagttactgatttgccggggaacgcgagcggggatgtgtacatgcatgttgggtctgcggtgcgcaccctctaccagcccggcaacatcaatcccgtttattacgcgctggaagcattggcaagaaacgatattgaagccgaagaaacggctgattttgtggacattaacatacctctctaatgatgaacgacgcagaaatacaaattcagttcccgcagcccggcaactggcaggaattcactctgacagctgtctatcaggacgcggacgggtacacccgcatagaccgctatacgcaggacgaaattccggcgaaccagaccccggccatggccgccgtcgttgccgctctggtggaactgggcgaggactggcaagccgtccaggtatgggcaaggctgggaaaaaatgccctgacccttgcggaagacggcacctatacaatgattgatgcggtgtctttgaccgttgaggccgtccatgcggagaccaaaggccgcaggatttttacagccgcggactacccggcttttatcttggacgaccccgccgccgtggactttttcaagcacttcactaccctcaatcaataacaaccataatcatatgactactagtaataaatgcaatcacgccttggaaattgccgaggatatgtataacgcctatgccgacggcaaggaccgctacaagcaccagccgatggtgaaatacgccgacctgccggacgacgataaagcccaagctggctgaacgtagcagaacaggccctccccatcatcggcaatcacgccttgggagacatccgcgactatctcggcgttaaggcttccggcgcgtccacttggtggaaaaaggttctgctgggcttggcctacgccgctgttggtgctcttggtttttccctgttccagggctgcggccattccgtggacgtgacgccggaaaagacggtggtatgcaaagacggctcctgcctagtgctggaaccggggcatatctcctacagtcaggcccagccggaaacggatgttccgcccatcgtgcaaaccatcaagaaataaggccatgtgtaagctctccgaagtaccggcgcgtttcctggattttgccaaggcttcccccgtgtttgcctgcgtcctgatgtcgctgacgatatgcggcggggcatgctggtacatcggggaggtggtcagccaccacaatgaccgcctttgtgatctgatgaccatgcagacgcaggcccaggtggagacggccaaggcgatccaactacttgccgtcagaatcgaaaacatagaaaggaagctggaaaagtgaataatctcctgaacctttccgttcttctgcctctgatggggttcgtgatggctaagctgtttttgccgcgtgcggagacacagaggtcggcattgccgtgttctgtttccccattgcgtgccttgtgttcctccgatgtgcggaacgctgaccaactgtaaagtttttcttacaagttccctttatttaatagccaatagtttacaatatgaatcctacagaaagaaagatggccgcggccatcctccggtttgaagacagccgcgttaccgggcctgattccctgcgcgtttcccgccttcccgccgccgacaagggcggcaagtgggagatttgcggcatttgcgacggcattgaaccggccgtgtttaacagattgaaggccctgctggatgccggaagacgtgaagaggcctgggaaggttgtctccagtatgtcctggataataccgccgccgtgcgctcctggctgggttccgacgcttttcctggcgttgaattcatcctgcgggatcattatttcaattctgggagcaggaataccgggaagattttgcagcgcgcgctgaatgtccacggcgccggtctcacggtggacgggattgtcggccccaggacccggcaggaactacaggaccagctggccgccacgggtgaagcggtgttccttatcgctctgcaggagaagcgtcaggcgttttaccgttcgtgcaagcagttcccgaccttcgggcgtggctggttgaaccgctgcgacgatgcgttcagcgtggcccaggagcttgtttaatccttaaatctctattcgttcatggcattatttcccaagtttcgcggcaaggtgaaagaggcggtccagatattggtttctccgtttgctgatcacaaattcaagcactggccagcctccgaacttgacccggaatccctgaaatctctgaaagagtccattgcttccgggcggctggaccggcaggaacagctctttatggctatgctggaaaaatggccgcgtctccggaagaatcttggggaaatagcaaacgccgttgcccgcatggaatggacagtcatgccctggacggaaaaaggacagcaaccgaccccggaagcgcaggaaatggcggagcttgtcgaatctgccttctggcggtcagaaccggaaccggacacggtagagcagggagcagacgatttgctcaaatccctgacctatatgcttacttgcggcaacaccgttcatcaaatcaaatgggcgtcggatgatatcatctacccccgctgttacgagcctctttccgctcaattttacgcatgggaatataactacggcaggaaggatcgtttgctccttttccgcaacggcctggaaaacgacctggaaggagaagaatttcccccggacaagttcctgattgggctgaataaggccgacgtgttccaccctatttttggcgccaagctccggtgtcttgtgggatggttcggagccgcctgttacgggttgccctggctgatgacgttttgcgagcttttcggcatccctttccggacggctaaagtcaggggtgacgaaaaagcaaaaacggaggcggcggaaatgctgcaaaaccttggttccgggggatgggccgtcacaacgcagaatatggagtttcagcttcatgacgccgtaaagggagccaacgggctgccccaggcggatttgatcaaactggcggacgaacaatgcgacaacctgatcctgggacaaacgttgaccagttccaaaggggacggaggggcgtatgccctcggcaaagtgcatgccggtatccgcaaagagatcattgaagacgcggggcaggccgtggcgaatattctcaattcccaactcattcctgccatcatccacttgaattacgggcatgttccttcccgtctccctcaatttgttccctctatccgcggcattgacgcagaagccctggaaacggttgccaaagcggcggaaatcatggatgtaggagaagaattcgcccgcaccatcgtcaagatacccaagccgcgttccggcgagcctgtcttgagaaaagccccgtctatcggttccgctccgggccaatacggggatgccattgaagccgctgcctccgagggaaaaaactagctccgctcgccctggccgtcgagttggagcaggacgcggaaaaggccgcagaagaaattttacaggcgtgggccgagccatgcgctgattttgtccgggaattgatcggcaaagcccgttccgggctttctgatcatgaatttcgggcggaactggccgctgtgcttgcccgccttccggaaatggacctcaccaatgatgatttgctgcaggaagccctgtgggacgccagcgcggaagcttaccggaaggggtgggaaatcaattggattgaagacgagatatgaacctgacgatcgacttgaacggtgttgacccggtaattgcagaagtgaaaaaaatagcagctccggaaagtttggcgaaagccaatgaacgcatgggggagggagtgaaaagctggctttcgtcctggtacaggaacaaggcggaatccggacactttgaaaacacgtccctgccgacccacgggtctggaaggaagaaaaccgggtgggccaacgacattgcccgaaactggtttgccgagacgacggcggacggtgcccgcatctacctcaccgggcaggcaggggaggggaacgggggggaacctctagaccttgcacaatccctgttattgaaaatctacggcggcacggtgacggccaagcgggcccaggcgctgaccattcctgtcattccggaggcgcacggcgttcgcgctggcgcttacgcctctatgacgggccgcaaacttttcactcttcgtaaaagcatcctcaaccttcgcaacagcatgaccggctccggattggagccgggctgcctttttgaatcggacgggcatggcggagtcagggccgtctataagctcaagaagtcgcagatctttacgccatggccggaggcttttccggatatggaagaacttacgggcatagcattcaaacacttcatggatgccatgcttgatgacgggggaggttccgaagactggataaattgactaggagagctaagctgaaagacggtgtaaaataaaccgccgcagaggggaaactgcggcggagtagaaaaaagatttgttatagaaatagttttatttcttttttaaaatataatgttcggataagattccttgattaattgatccttctttgtctgacaacattaatttactaccatcaagtattttataataagatttttcattagaagaggttagagataattcaatcaagtttccatttatcaaattataatgaccttttgattcgaaagttgcgcttttttctccttctcctatatattcgctcctcagtatataagttttatccttatttaatgtcagtgtcgtctttataccttcacaatcggcagcgggaagagttccttcataagtgccgtaaaaattagaattttccgacttgttttctatttttgttccaccgttttcaatttgatcatgattctcttgaggagcattgcaaccggttatgacaactaaacatgtgacccataaaaaaatcattttcatggtaagtacctttcttttttaattagtgttttttcttaattcaatagagcagggactgagaaatcaattctctcccaataccattataatattacgtaaaactttgggaggtggcaagatattattctcggccagccgggattttattcctgatcgttacggcttgaatattttgtagcccattttgcgtctattgccccatacctccactgtgcctcatcatgggggcatgagtacgctgataacgacggtagcaagcaaccacggcaaggctcccatggctatcctgtgggcccccaaaggagaacatactattaaatgctcgctcaacggccagccgggaacgtgtgtggtgcgggtaacgtccgactgcgttccccggctcaatgccgacctggaagccaagctatccagcaacgtcaaaccggtcgggctctatgatcatgagatggggcccgcctcttacaagccgggacggtttgtgtggaacgaggaaaaaggcgttgtgttggaactggaaggatggacggagaagggaagaacggacgtggaaggcggcaattacggctatcacagcccccgcttccggcgcgacaagggaaccggggaaatcctcggcctgttgccggaatccatagaagtaggttccttggtcaatgaccccgcatttgacgacatcgaacgcattgccgccagccgaatggagggcgacgtagcccattttgacgacgttgaagaccccgggaaaccgggcgacaatagagaccttgagaagcccaaggagggcctcgaccagcaagacaaccatacaaccaaccgagacatggacatcactaaactcgttgccctcggcattttgaccgaggaagaagccaaggctgaaaatgccgaggctatcgtgttggagcgcatcaaggccctgcaggacaaaggcaaggccagctccgacgaattggaagcaagcaagaaggagctggcgaaatgccaggaagaaattgccgcatccaggaagcaggtgaaggaacgcgccgtccaggacgttgccgatgccattgctgcgggcaaaatcgccccgaaggatgaagcatccaagaccttttgggaacgagccctgacggaagactatattgccgccagcaagcagttgaacgccctgccgaaaaatcccgcattcgatgacgtgaatgccggcaagccggaagactccccaaaagaacccgtcacgggaaccgcggctcttcgcagctcctttgaaaccgaactcaataacctgaacaagtaatatgcccgcgaaaagatttatgaccctgctggacgtgcttcagcaggaaggaacaggatctatcaaggcccttgacgcagtccgttctgttggacttgcatccccggaagtaaccgcgtttcccgttaccgttattgacggaacgcagtacgaaatcaatatgcccaccggcattccccgtttcgggtttcgtccggccaatgccggagccaagaacctgacgaccgaatacaccaataaaaccgttaagtgctactacattgacggacctattgcggtggacaaggccgttgtcaccagctccgccaggggggcgcagctgctcaccaaggaaacccgaagcgttacgttgggtgccatggcctccattgccctgcagatgtggtacaggcttccggaacaggaaaatgtgttcccggctatttctgaacagatgggggattatatgaccatttccgcagatccttccaagcaggaagactcggaagccaaccgcgccgacaactccggagcttccgcttacctggtcattttgggtgacgacttcctgcactccatatgggggaacaagaagacgctttccatgtctccggtgcaggaagagaccgtggccaggaatacggaagacggggaatcaggaacaatgagggcctatacttcccgtttggaaggctggacgggcattgccgtggaatctccgttttccgtggcccgcatcaagaacatcagcgcccagcatcccttgacggacaaacttgtcgccaaggcgaagagcctgtttcctgcggccttgcgcggcatgatttcctatgtggttatgaacggcaatgtgaaattgctgttgcaggaatccagaacccttacgcctgccaccggaaacggcggaacgggcatgatcgcccctgaacccgattccgtgatgggaatcaagattctggaagtggattccctgcttgatgacgaatcactgtccagtgtccgcgccgcatttgcggaagactttttccgcgcccgtcgcaactcccttgccctcaaaaattaaccttttatccgcagaaaggagaaacacaccacatgatgaagaatatgtaccgcaatgacgaagcgcttacgatccgtctgaagatgccgggaaccggaaagacggtaacgtctgccccgattcatatcggacagaaaggaggcatcgacagcgctgtcatttcattgaagcacgaagagcttcccgcgctggccagcggcaagacgatgaccctcaccgtcgaatcgtccgaggacggtgatgcctggacggaactggattccccgaagctggttgcgacggggggtgagagcaatggttccggctccggagaagtgttcatgcgcgttccgttggaggccggcccctggctgcgcctgaaaatcgcagctgaaacgtccgcaggcgacagcacggcacaggaagccgtccttgccgtcaaggtataaccttattgaaacaatggccctcgtaaggattactccggaagcggttgcccgctattgcctggacaaggaaattacttccattgcccgggacaaaatcagcgacatcatccgcgaggtctgcaacgaggtggcggctgcagtcaactcctgccccagaaatgccaggattgcgatggattccagttccgttcccgcggagttggtattcaccacctgcattctggtgcgggatgccgtcaccagctccgtgccaggttcaagcgaatccctgcaggggacggcgcgggcggctcaatatcaggatgcccgcgcgaaactccgcgccgtggctgcctgtgaagtcgagtttgccccctacgatgggcaccagcccagcaacgtcatttacggagggccgaaacaccaggattggagcaatccgatatgaagaaaaccctgaagaagtcgcctgtcattgcatttgcggaagtcctctgtcagcgggccgtggaaatttgctccgcggccaacaacggggaagacccggaaatcattattaaggcatgggacggttcctttgaggaagaaatcaagagggtgaccggttccctggaaaccgtcatcgtcatggagcgtccggaaattgttccggacaagttgagcaggagcggcaaaagcacggccagatggcacgtcaccgtggagagcaacccgcttctggacggtgacggctgggacgccgacgaccttgccgacatcatccaggagggctttcacaagtggcgccgcaaccatgcccggctgatgatgacggaggtaatcgttaccagctccaagctagctctcgccaaaatcctgaaaaagtccatcgtcctgacgatggaaacaaccctgattatcaaacatggcaactaaacccaccaccgccgcggcccaggaggccgctactgctccggcgccccgcatcgtcaaatgccgggtggccgtcaacaagctggaactccctcacggcatcgccgcgctgggaaaaatcgtccacatcccggaagacgtgtacaaagtccacgccgacgccgggaaagtgacctttattgactacgtaagaagctaacaaccatgtcagaactctacaacaaggaaatgctggtcggcacctttctcgacctgtgcccgttcggaacgacagtcacggccggaagcggcacggacacggtggacgagcaattcaagctggcgaaggactccgacgcctggatgatggccaacgaagtcatcgactacaaaatcacgccgaccacggaagacgacgcccgcacggtattttcccgcgacacgacctcctacgtcacacggaagaacactaaagtgacgggcaataccatcgagattaactccacggaggttaatccggtctgctggcaggtgatttaccagtgcgacaggctggaagccggaaaggaagtgcagcccttttcccggaacatctacgggcaaaaggtatgggcgcgcctcaccaaataccaggaagacaaaaaagaaatgatggtcctggaagtcgcggcgctgctcaaggtggaaatccccacggaaaacaacaagctgatcacgccgaaattgacgcttgaagtgatcccgtcctccctgaattccctgacgcccacggaagaaatcgccttcccggcctccgccggggcatgacagccggggccgcccctctgtttgcatggggaggggcggcccctgtttcccccaccattattgaggcatggacacgaccgtatctcccttttccattacctttgacgggcgccccgtcgtgcgcgccggggaattcctgctcgactccctgccggaacacgctttcccggtgcagttcggcacgtccgccacgccgatcatcaacagcccgttccccaggctggacgcattcggcaacctgtccctgtccttcaccatctccaccgtgcgggaatgcgcctcccacatggacgcgtggagcgccttttacgaatggctcaacgaatggaaaacggcggggaagggggaatggacctggaccgacgcctgcggccgtgaacagcgctttgaagctgtcatcgccgacgccgagccgaaggttcagggcctgcgccttattgtctcctacaacttcaccctgggccgccccctgtgaaaacccttgacgtatcttcctccgacttcctggacatggccgaaagcccgtcctacaaccggctctccttcgggggagcctccgtctccttccgcgcgccggtctcccggtttgcctcctgcccgtttgaagaaggggaaatagtgaaagttgtctggcgcgggaaaaccctgctcatcggcccggccatcgacctggaacactcccttgaaggaacctccgagagctgggacatcaggatttgcgattactggtggaacctgagcaacatccagtacttcgcgaatggccgcgccaacggcatctttgccgaataccgccgaggcacaggcggaagcggtcaggaaaaacaggcgaccgcgaacatccgggacgccctctccggagtcctggaccacgccgtcagcacggccctggtccctatcaaatacgacctccggatcgacaaggatgccgaaatcattccgtttgcctacgcgtcggaaacgtatgcctccctgctttcccagatccagcaatggcgccccaacatggccgcgtggtttgaatacggcgcggacgactccgccacgctggtcattgccgaccatgccgccctgccggatgtcgtgctcgacctgtccgccgtggacgtaagcgccctgtccctcaaggcgcgccccgatctggtgcctccggccgtggggctgacctgcaacgcttccgtggtctcccgggttcagcgcgcgctggccgtctatccctcaggcgcctccctgtcccagccctatgtggtgacggcggaagtggacgttccgggcggcgtcaaggtctccgacactgccgggcaatacagccctgcggaaacgggctcgctgggttacgacgccccgcggatgattgtccggggagacaaattcccgaccggcacggcccagtgggcggcccgcgtcaaacgctgggctccggccctggaggattgcgccggcctggaagtggcggccagtccgaaaatcacgtccatcacgccgactgacgcggaacaccggggatacagcagcgcggccatcacccacgaactgacctccggccagatcaacggaaagagcgcgagaatcgaatggggcaaggtccgggtggatttgcgggtgcgggcgacggatccccccgacacggtgaaacaatattttccggaatacggcggaaaatccggaaccggggaccgctggatcggaacattgacgtttgaagtgactacgacgaatgtcggctacgcgtcctaccgggtggacagggcagggacggtggaaagcgtatccgacgacggcggaagccccggagacgacgaaacatcgggcagctacgacacctccgtgttgtataaaaatttcctgaaatcctactacgaagccacccgcgcgctgccctatgacggatccgcgaccgtccacgatgactttgaccaggtctgcgggggacgcttctccatcacggggggattgaaggaatgggaaaccatgcgggccgtcatccaggaaatatccctcgaccttaaaacgggagtttccgacgtgacggtgggagccccggaacagatctccctgcaggactccatcgatcggagcaagcagcttgccgaggcgctccgccggacggcctgggcggattcgtccacgtccgccgggggcggttcttcgggcggaggatccggcagcggaggcggaggctcttccggagcggacgatgaagtcccggagcttcccagcgtcgggccgtccgtaaaactgctgcaggcccaggagcctcccgcgtggggaaccagcgccgtcgaggtgggattccaatgccgcctgtcttacgggagcgacggcaaggtgtccgacgcctacatccgccaggggaaggctatctatgcaagcaactatatcggggggctgcttccggagggggacggttccgggggctgggtgaaaagccccgtcacctccggggaaatctggctcaagatccagctggacaaggacgcgaaatacctcggatcctctctgtccgccgcgggcggcgtctccgaccccgtcaggctcgcggaggaagaccggaaaaccccttatgaatattatttccatctggccaccatcgacggcaacaaggtggtgcagcaccaggcgggcacggtttatctccaaatccacccgggaaccttcggcccctccggaatgtcatgatcaggatatacaccttcacctatgccggagacgcgcaggaagccgtggcctgcgtccggtgcgccaggacggctcttccggaggcggtagttacggtggtggacgacagcgccgccccggtgcccccggaggccaggagggcccttgtagcgcatggggcgcggtatcgccggagttctttcccccgctgcggcaacctgcgcggcccggagtgcgtccggggaattattgccacgctggccgggggggcggcggatggcgacaccgtcgtcaagattgactccgacacggtgcttctgtcgggcggctgggtcagggaaatgaaacacaacgggcttgcgctgcacgccgccggataccgggttccccggaacccgtccgaacggtccgcctacggaaattgctacgccctgagcggccgggcggccaggatggccgcagaagctctggaatgcgccgccatccccccgctcgccccggaagacctcaccatctgccgggccgtcatggatgtctgcggccgggagcgtgtccggcttgacgagccgtggacgcccctgaaccgggccgggcggtggtcctggtggaactgggacagccggacggcgaatccggaggattatgcccgcagctatgacgtggtgagcgtcggcaatccccggcctccccacgtccccaaaagcgcccgccgggaagtcatgcgcgccctgtgcgacgcccgtttgaatctcaacagccaatcaatagaaccatgtcagacagaaacctgaacatcaatatcagaacgaccgccgacacctccggtgccactcaagccgccgcatccctggacaggatacgggaatccggcgaatccatgtcgcagacttccggcgtgatggaccggatcgcagattctctttcccgtgtcaaaacggctgccggggaaaccggcgacgccatgaaggacggcatgggcgcggaatatgaaaaagccctggaaaacgccaattccaaacttgaccaatacgccgacgccctgaccgccgccggctcccggatgaaagccgccttcaacgacaacccgggattgaccgggtttattgacgaagtcaccaacgccgtgctgacctccgaggaattcaggaagaagctggaacaggtggatgacgtctttgaagtcctcaacaacaaaatgtctgatttggatctcggggcgaaatggggagatgaccttgacgaaaaccttcaacaaatcatcgacggctacaacaaggaaatggacgcggccgacaaggccgcggaaaaggcggaagccgcggaggcccggaagcagcaggcagccgccgccacggtggaacggctggaagccaacaaccgccgcgcctctgccacctatgaggaactgcaggccgaacttgaatcctacattgccaagttggaagaagcccggaaggccggggacaacgtggcccaggcggacgccctgaagaatatccaggacctgggacggcgcatcaagacggccggagatgccgggcaactcacctccacgcaggtcaaggggctggcggggcagattaccattgcggcaacgcgcatcctgggcatgtccagctcgctccggggagctatcccgttcattcatttattcggaaccaccatcaaaacggcgatggggccgctgggctgggccatgctgctgatccaggggctgaccgctggcattaccgctttgattgaccactttaaggccaaaagcgacgaattggagcggcaggcggagcaggcaaccgaaaggatgaaaaaacgtgccagggatgctgccgaatctattaaaaagagttatgaagctatccaggactataacagatccgaccgaacacaggaaatcaacaaagggttcgaggacttcatcaagggcattacggcggaataccgtttgcagacccaggaaattgagcggcaaatccagttgagaagggaggaaaccgcccgccagaaggggattgacacgcaggaagccgaacttgcccgcgtgaagttggacaatgactttgaagacggaaaaatcaccgagaggcaacgggactacggcatgatgatgatcaaccagaatcttgacgacaaaatacgccgccgggatctggaagtagcgcagaaggaattcatggactacggaaagcagttggatacggccgttcaaaaccgtgaccgtttgcaagacaaggacttcgatatgaagttcattcaagggcagatgccttcccttcaggaagttcggggtctgttcaatcaacagcaaaaagcccaggaacgaattgatgccgccaatagggaattaaaaaaaatgccgaatcctgatgaattaaaaaagcaaatagataacttatctaaaattccattccaagggatagatattcttgataattcgcgttctactttactcaaagaacttaaagagaaacaagagaaacagcaacgccttttgtctgcccgtgataccgcccaggatgaaggaaacgccgccaatgtcagaatagatgaactccgggatttgtttcgtcaatccggcgtgaactttgaaccctcctacaagcggggaacggacgtaaccagccgaaccggggaatatcaaaaagccctggaagaccagaacagcaaggcaaaagaacttgcggacaaacttgccgatgccagagaagaagccgggaagctgggggatattatgggggcctatgaacgcaacattgttgatcaggagcggagcatcaggacgcaagaccagctcaattcagccaatatcgacttgttcaacaagcgggccgacaaaaaggaagctcaggaagccaagaaggcccaggaaaagcttgagaaagagcatgagcgggaattgaagaagcttcagcgggaacagcaaaaagatgctaaaaatacgtctaaaacttttgtacaaggattgcttatgaagactggcgaaagctctagcccccagcaatcagacctagccaacaaggcgcttgatgccatacgtaaaaatatagaagctgcggcagctgatggacacattgatgaagctgaaatgagagaattaggtaagctctacgttgctaagcttcaggaattaggactggcaacaaaacgtgccgtcaatggactaaaagaggaattaacccaggggcttagaggaatcaatgctcaaattgacgcaataggaaaatgggctaatactaccgaaaggcagaaacgccccgggggcattgttaatcttccttaccgtaaaagatgatggacaagcccttagcattcacgtccttattttaggggcgttttaatctttgttcccaacgttatataacctcttggctattgtggaaagcaggtcaacgacacgagagagcaatttgataaccttggcacaccagaagcacccaaggcagaagaaggctccggaaagcaggtaaataataccaatagcggcatatcctggccccgtgttgcataaagctagtatcaccccagcgagtagagcaagaatacccatgatctggaataatccctcaacagttatctccaacggttcagattcgcttggtcgtgtatcctgttgttcatgaatcttttgccaagcaggtttatttaattgtgcctgtgcttcatcgaaccttcttcgtgcctcttcctcttttttacgggtagcctcacccctttgaaaggcttgtattttccgctcatgttctaaaagggcgtaaaatcgcatccatctttgatccccagcaatgcaaacaagagtatcatcatttatcttgccttcggtgtagaaggtttccaaagattcaaaagaatacggcccctccgtttgcccttcctccgttgcaatgtaataccgttccattgctttttatcatttccagatagtatttttctgcaagtccaaaatagacaaggctgattttttctggcactcttccttctggaaagaattaccgagaatacgagcgagaaatgaatcgtaaaaactgaaatagttacccagtagttacctatgaatcgttttctaataaaaatattgaaataccaatattttgaatttgtcttaaaatctgttgtccgcaaggacgtaccggttcgagtccggtcgggggtactttatcgaaattaaatcttgtaaataaaaagcccgctgtttgcgggcctttttgttttgctgcaatatcatttgctggctgattctccatcaataatttttgttttcccggatgagtaaaacaaggatggtggtgtttcgtggctattcttgtcatgaaatgcagaaagcagagagaagaatgttgagtggaaacagttctgaaaaaagagtttataacagggcgcctctggctgaaaaatagaaatacggagtatgaaattgttgggtatcttccggtttggaaaatcagatggttcatggcgccctggaaaaaagggaatgctgctggcgttgaaaatagcaggaggcatgtttgcgggagcggttgtggtatgcgttgccgcagaatggtacatttattccgtttcagagggcaggattgttgagcattccagggatgttcccgttcgtgctcctgttctggtgttaggatgctccccaacattcatggggagccctaacggatatttccataacaggatggatacggcctcggaactttggaaagatggaaaagcaacggttttcatcgtttccggagataatagttctcatgcttacaatgaaccggaatggatgaaacaggctctggtggaacgtggcgttccagaggaacggattgtatgtgactttgcgggattgcggactttggattctgtcgtgaggatgaaggaaattttcggcgtttcgacgatgattgttgtttctcaggaatttcataatgaacgcgccctggcaatcgcagcgcatgaggggatggcggcctgggccgtcagcgcgccggatgttcccaaccgccgttcccgtatgaaaagctggttcagggagcgtgcggcccgcgtatggatgatgctggacttgtgggtttggagccgtgaaccccgttttttgggagaacctgtggttttgccggaaataaaagaggaaaaatgaacaatacttcatgcggcagggctcgtcataagatgtctttgatgcggtacggcaacccagaaggagggtgtgcccgcgccttgaatcattaaatgctgaatggtccaatcatgtcggctacgtgggatgatttgccatgaagatgaacaaggccagaaagcctgagtgaacaattcgtcatgaagacggtcggaggtggtggccgtacgtttcattgtccttcatggaagaaacaggtgcaatccttccccttatcttatgcgtatgggtgggcaacggttgaaaaaaggatggttgggaaacatcagaaagctgatgctctggtcggaataagtttgcctccatatctttggaaaaaacactccggaacaggttctgttgcgttttgatgcggctgacgctccctgttggaattccgtatttgattaaaaaggggaaaggatacggtaaaaatcattgactctttccgggaaagtgctatgcagatttcagtgctttgtgaaaagcaggctgttttattccggctgtcatgttcccttcttctagcggtcaggaaggccgtctctccaacggcaaaggctcggttcaactccggcagggaatgccatccggcagccatgttttgtttcctgccgtgaagaggcggtaaattgcatcaggaaaagcaagctacgggggagttatgatggaaacacgctttcaatgactttccccgtccattccggtagtggctttcctccgaataaatgaagaagcatgggagcggtattggtggtattgtttggttcggaaatcaggaaatttctcttaatgcccggacctgaaattccccatggaactatcatttccgctgcgctcgtccccccgtggccctttccgattcccccatgatccgtcagaaatagaaaatgcgtatcgttgaataagtcttcctgcctcaatttctgaaaaaagattccaatttgctgatccgcctcttcaatagattgaaggtattctctggacatccagccgtatttgtgccccgcatgatctgtatgaacggaatagagaaaaaccacagtcgggttgtagcggtgtttcttgacgaattggaaagcctgatggtaattggaagcataggcgtcgtttgccaggtacttgatttcatccaggtatttttcgttgaacggataggcaagaggtttccaattatagtaaaaagctgttttgcaggaaggctggcattttttcagggcctggaatacggagggataatatccgtcttcatctctccgtacggcggggtaggaggaatttgcaagcatccagttattattgaagactccgtgctgttccgggccgctgccggttaagtgactggtccagttaggtaacgtgacggagggcatcacaacccgcgtatccagagaaaaagctccctgtgacatcattccttttaaagagggcgcatgcaccttttgaaaaccttccacacaaataccgtccagggaaatcatgatcactcttttggcggaattatcggaagttctatctggtacggaatttctgggaatgccggaatcatattgtgtagcggcaagggctgtattgcccgttgtcattcctgctgccgccaggcctaattgattcaggaaattccggcgtgttgtttgatgataaaagttttccatataaagtacatactgttggcttgaagtatttttatcaacgcttctggatattcgggaagctcatttcatcgtatagttttttacggacaggggccgaatccgggtttcaaagcaatttttccaataatttgttcctttcctgtgataggatggttttatagagaaaggatatcatcatttattgtattcaaatagttaagtgggtgtgacaatataggaatgctccgcaggctgtctcatctgcgatttaggcaaagcatcttccatacgcttcaaacgagggggcatatcatatttgttacgggccgtatcctcatcaatgttggccagaatgccgggcgggagcggggactctcaatctggacgttttacacaggatgacattttccgcgagctggagcagatttttcaaggaagtgggtgttacgcgctgccgtgtggtgcagtcagctccctgaagaaagatcagccggaggcagacagatgtccctgatgttattcctccaacaagacgggacaagcccggcaggtgtgggtgtttgccagccatcacgatgctcgcgccgccattattaaatcagccaattagcataatgataccatgagagagatacaaatacagttttccaagcccggtaactggagggaattcacactgacggccatctaccaggattcggatggatatacccgcatagaccgctataaacagaatgatataccgtccgggcaggccccggctttgagcgcggctgtagccgtcattgcagacatggaagaggactggcaagccgtccaggtatgggcaaggctgggaaatacctctgttctcaataattccgcaggagacgatgaggccgttgagtttcgtgaagccgttctactgacgattgaggctgtcaatagcctcgggggccgccgtatttttacccccggtaattatgcgcagttcatactgatggattttgcctccatatcgtttttcaagtattttaccatcagaaaataataaggatatcagcaaataagattgttggactgactgcatgattgcggcagactgggggatatgtgatgcagtgtttttttccggacaaggcgtttccggatttgtcgatgcattgcaacagttttaaatggaaaagatgttcctcccaggcaggagcggatcaaaaacagggaatcaatgacagtaaccccatgagtgacgtaaagcagttcttggtcaacgttgggaacaggaagggcctggtctgtcgtgatgcctcaaaaattgcagattcccttatgctctgatgtttatcggaaaacttggatggagtatcgtcatgcggctttaaaaatacagtacattgtttctaaaagccgttatcatgtactgcggttctataaaaacaacgaccgcaaacattctatttcaaacgcttgcggttgttttgaaatggtggaggcgacgggagtcgaacccgtgtcctgaaggccattgatgacggcatctccatgttcagacgcatattgctgctttcgcggctgcttcgctatgcgtcaactaggcaagctcgctagttgcctgtggaagtctcgtgcgttgcgcggcaaccccgcattgcaccagcctgctgtgtcttcgtcgtcccctctagcaggcgttgaggttctgacgaggctgaactaattaggcagccagagcaaggtcgttagactctgcatttatttttttaatcggctttttagaaggccagccgattaaccttcacatgcagccagcaccgcagacttccagtcgaaaccatggcgcccccatatgtatttaccagtagagacaaaaaatcccgccgtgacgttcaggcaggaatcattttatttgctggcagtgatgcaagtggcacgcccgtagggattcgaaccccaaaccttctgatccgtagtcagacgctctatccaattgagctacgggcgctttgacttgcgtcgtgtaccgcgtaagcggtgaaggaaatatagatttttcttcgggaaagtcaagatgtttgtaagatgatttgagaaaaaaattcatttttctctttttgggagaataaattttcagagaaagaaccgttaactgaggggtggagaaaaaggggaaaggcgttgcgccatggaatggcctgtggcacactaaacggagaaaatgagcgagttcaaggtgatcaggtcgccgatggaggcattgaagaagtacttcggcttttccggcttgagggagggccaggatcaagtggtggcttccattatggaaggccgcaatgtattggtcgtgatgcccacgggaggaggaaaatccctgtgttaccagcttccctccttgtgccgggacggggtttgcctggttgtcagtcctctaatcgctttaatgaaagatcaggtggatgctcttgtcgccagagggattcccgccaccatgattaacagctccctgagttttcctgagcaaaaggaacgtttggaaggaatgaaaaggggagcgttcaagctggtatatgtggctcctgaacgttttggtcatgaagggttcatgcatgctctggcggaggtggatgtaaatatggtggctgtggatgaagcgcattgcctgagccagtgggggcacgatttccgtccggattatctgaagctgggaaaagctgttgaaatgatggggcggcctcaggtggctgctctgaccgccacggctactccgcgggtgcgggaagatattctgaaacatttggggctggatgatccggtgacgatcgtacgagggtttgcgcgggaaaacctgcatttccgcattactgcgtgcgatacgcacaaagacaaatacaagaggctgtacgaattggtgaagcgttacaagacgggtattatttattgctccacccgcaaaaaagtggagcaggtatatgaggctctttccgattttggattgagcgtgacagcctatcacgcaggcatgacggatgaacagagagaggaagcccagaacgctttcatgaaccgccatgcggatattgttattgccacgaatgcttttggaatgggtattgaccgtgcggacgtcaggtttgttgcccattttgagattcccggcagtgtggaggcctattatcaggaggccggccgagccggacgagacggggaggaggcttattgcgaacttttgttcaaccatgcggatttgcggacccaggaattttttattgaaggagtgaatccgggaattccattgattgtggagctgtacgagttgctcaggaagcattgcagcgcggaaacccacgatgtcatgtggtctctggaggaaatggcggagcgtctcaaatgccgcaatgccatgcaggtgggagctgctttatccgttcttatacgcaatggagcgatcagccgtcatgacgttccgggacaacgcgtgaagcttaccagagtgacggatacttccgtaagcggcttgaagattcctctggatgaagatgccctgcgggaaaaggaagtgagggaccgggaaaaactgaaggcaatgacggagttcgcttattcctccggctgccgtcagcaatggattttgaattatttcggggaggaagatggagtgccgtgcggccgctgcgaccagtgcctggctctgggcgttgaggaaggccaatccctgggagaagaagagactttggtggtgcggcaggcgttgagcgggattgcgcgcgcatccgtgcgtttggctgatggttcctggcagggaaggtggggcaggacgaaaatcatccagatgctcaaaggggcgaaaacccaggagttgttaagaacatccctggtccggctgagtacttatggcatcctttcccgatggagtgaggacgatatccgccagttgttccgtgctatgcagatggcgggattgaccagaatgagcggggaggcggaccgtcccctgattaccctgagtccgaaaggaaatgaagtgatgatggggcgcaagaaggcatctttggtttggccttttgcccgccggggaaaaatatccgtatctatggagcaggccagagttcggtctacgggaaatttggctgccctgggagagtttgacgaggatttgtttttgaagttgaaggagctgaggaatgaactggcacgggaagccgggattccggcttatgccgtgtttcataattctacactggaaggtttggccaggttgaaacctaccacccgccgtggtgctatgaacgttcacggcattggagagcagaaagctgctcgttacttggatgatttcctggaagtcattgccgagcattgcggggtgtgaatttgtctttccgatttgctccaatcaggcgtacgccgtctctggaacgtggtgttcatgctgaactgaggaactatttttcatgaattacggaaaaaatgttccatgctttgcgaatatatttgccgggaaaatgcgtatttgtttgaataaattgttcatcaacatcaagttgtggatattttgactctttccagatggttgttttcctgccctcatggaacaatcaaatgaatggctgtctatcccgatccagtagggtcgagaagattgcctgatcaatatttttgactgtattatttatgtattgacttcattttgggaagcgtgtagtctcctttccacacattacccaagacggagcggtggctgagaggctgaaagcactcctttgctaaaggaacgtactggcaaaaccggtaccgagggttcgaatccctcccgctccgccaaaacttttcttttttaagagcctgcactttaacggtgtaggctctttttctttgcaaaccaggggattagatgctggggaattatttgctggtctgattgtcttattttagttttttattttttcatttgaaattgaataacttaggccaaaaacgccggttaggatgcatagccagcgttttttctaatatccttattataggcatcaggataattataggtgcatttggaaaaaggtctggactggaggctgtccctgagggtatttgtgtgtgtgaatgatgatataaatttttgaatgtaagttagttgttgcaggagatggacaggataaaactgccgtggctggtaaaagtggagagtgcccggaattgaatggacacgaatgtggttcatgcgccggtctcggagtggttcacggccgcatcggatatgttaacagcttcaggatgtgtgggaaagtatggaacagccactccagaatgggctctgtctttttttaatctgcggaggatttaacggattttggaataatctggtgttatcaatggtcaagaccatgaataacaatattaaagaacatcctatccaatttgaagcagatatgattcgggcattgctgcaggaatacagcactcccggcgagcacaaaaatcaaacccgccgcacgtgcggcctgaaccagtttaatgatctccctgaagctttgaaagaaagagggtgggagattcaggaatttatagaagagtccggctcgtggctggctgtttccgaggaaggaagcggaaagttttcagatatttttatcccgtggattgaatgtccctacgggaaagttggcgaccgtttgtgggtgcaggaggagatttgccataatagccgttctggatggctttattctgctgatggcgtttgtttgccaatgtcatatccagacggatggatatcaaaaaatgcccgcaggcagtttattccttcgatccacatgccgcgttgggcttcccggattttactggaaattacggaaatcagagttgagcggcttttggacattacgacgaacgatgcacggatggagggcattgaatgtgtttggcacgatgaagaaacggatgcctgtttatggagggattactcgggaaaatctgcggggttggcttttgcccggttatctttcttctctttgtgggaaaaaataaagggaaccggttccgctgaactgaatccgtgggtatgggttattaagttcaatgtgttaactatcaacggaaatatcaaataaagaatgttaatgccctttgtgaagaacaaaataagaatatgtcttttacagagggttcgcccactaagcggagggaatagcctccgttgcaattcagataaaatccgcgtgatgtaatcaactccgttttatcatgaaaaaagcgccttccggcaagggaaggcgctggatatgaaaaggtgaaaaagagggaggttacatccccttgtttttcatggcttccgccagggcggctcccatctgagccggtgtcttggcaaccacaataccggcgttcttcaaggcttcctgcttagcggcggcagtacctttgcctccggcaacgatggctcctgcatggcccatgcggcggcccttgggcgccgtggctcctgcgatgaacgcggcaacaggttttttgcagttgttcttgatccattcagcagcttcttcttcttcagaaccgccaatttcgccaatcatgatgaaggcgtccgtgttcgggtcttccgtgaagaattgcacggcctgttgctgggtcatgccatggacagggtcgccgccgatgccgatgcacatgctctggccaaggcccatgttggtaacctgccagacggcttcataggtaagcgttccggaacgggagacaataccgattctgccgggtttgaagatgtaggccggcatgatgccgatcttgcagttggcggaaggattgacgattccggggcagttcgggccgatgagggttacgtccttgtccttcaggaaggttttcaccttctgcatgtcctgcacaggaatgccttccgtgatgcagacgatgagtttaacgcccgcgtcagcagcttccatgatggcgtccgctgcgaagggcggaggaacaaaaatcatggaggcattgcagtccgtagcttttttggcttccgccacagtatcgaagacggggactttgccttcaaagagctgaccgcccttgccgggggtcacaccggcaaccacattggtgccgaagtccatgcagtttttggcgtggaacgcgccggcgcttccggtgatgccttgcacgaccagacgggtgtttttgtcaatgagaggtgtcattgtcgtaataaatagtgagggttatttaactgccgcaaccgctttctgggcagcttcgtccaggttgtcggcagggataatggagatgccgctgtctgcaaggattttcttgccgatttccacgttggtgccttccagacgtacgacgagcgggattttcatatcgatgtttttcgccgcagccacaatgccctgggcaatgacatcgcaacgcatgatgccgccgaagatgttgaccagaagggccttcacgtttttgtcgctggtgaggatgcggaacgcgttggttaccatttcctccgtggcggagcctcctacgtccaggaagtttgcgggttcgccaccgtagtatttgatgatgtccatcgtagccatggccagtccggcgccgttcaccatgcagccgatgttgccgtccaggccgatgtagttcaggtcgtacttgcttgcttccacttcgcgggggtcttcttccgtttcatcccgcatttccatgatttccgggtggcggtacagggcgttgtcgtcaaaattgaatttggcgtccagagcgcacacgcggtcatccgtggtgactacaagggggttgatttccaccagagagcagtccagagcggtgaaaagcttgtaaacgttggtgatgagcttggtggcctggcggagcaggggaccggtcagtcccagcgccacggcgattttgagagcctggaaaggcaggatgcccagcgccgggtcaatgtgttcgcggataatggcttccgggcgggtggcagccacttcttcaatgtccatgccgccttccgtactggccacgataacggggcattcccgggcgcggtcctgaagaatggcgaagtagcattcctttttgagatccacggcttccgccaccatgattttgctgaccagcttgccggtttccccggtttgcttggtgaccagaacctggttaagcatcttgcaggcgacttcttccacttcctccacggacttgacgacgtggacgcctcccttaaaaccgtttttgaaggtgcctttaccacggccgccagcgtgtacctgtgccttaactacgtattgggagaggcccatgttccgggctgtttgtgctgcttcctgagctgtggcggcggcaatgcccttgggggtagccacgccaaaacgctcaaagagttgttttgcttgatattcgtgaatgttcatgacagtgggccgtttggccaaatgtttgcggaagaaaggctaggactatttttgatgtcggtcaagggagaatggtttggtcttttgattttttgtccggaggtgccgtgaagccctgttggaaatcaaagaggacagaaggcttgactgcgtgcttaaagattgggaaacttccttcccgtttttctgtagagactttttatgaaaatttaccgtccttccgatacctgctttgacgaaatgaagcgccggatgaaccgccgcgccctcccggaggattccgtaagggataccgtgaacgctattatccaggatgtttccgcgcgcggggatgaagccctttttgactatgcctccagatttgacaaggtacatcttgattcttcctccctgttcgtgacggaggcagagctggcggaagcggaggccatggtggaggggagtgtgaaggaggccattgccgtttctctggcaaatatccattatttttcagaccgcagccgcaggcaggactggtccggcgtaaatgcgcagggcgtggaggtggcggagcggttccttccgtacgaccgtgtgggcatttatattcccggagggaaagcgcccctggtatccacttccatcatgacgggcggttttgctcaggccgccggcgtgcgggagattgtggccgctacgccctgcgggccggacggccgggtgaatcccgcacttttgtatgcgctgaaagcctccggcgcgacggaaattgtcaagatagggggcgctcaggcgatagccgcccttgcactggggacggagagcgtgaaaccggtggaaaagatttttggtcccggcaaccgttttgtggtggaggccaaacgccagttggtgggggctgttgccattgatttgctgcccggacccagtgaagtaatggtgctggcggatgatactgcggatgcagagtttctggctgccgacctgctggcgcagggcgagcatggcccggacagcgtagttgtttttgtcactacatcagaggcgttattggagcaggtggatgcggaagtggaacgccaggccgccctgctgagccgcggatccatcatccgggaggtgctggacaagcatgcctacggttttctggtttcttccattcaggaaggggtggaactggttaatgcctttgcaccggagcatttggtgcttgtcactcgggatgaagaggccgtgcttaatagcatcaggacggcgggtgccatctacgcaggctccctttctactgtagcctgcggggattttctggcgggtcccagccatacgctgcctaccggcggcgccggcaagtctttttccggcttgcgggcggaccagttccagcgccgcaccagcgtggtgcgcatgaaccgggatgctgtgctgaactccgccccgtatgtggcggagtttgcccgggtggaggggctggacgcccacaaccactccattcaggttcgcgccgcccgcgtgaaccggtaatcccggaattttcctcaatgctctccatgatgcaacagcagggaatcagggaacggttgcccgttgcagcagatctccttgttgccggacatggctatatgggcgtttcccggcatcatgggggtggagtgggggccgttgctgagagcatggtagtcggcttgccgacccgtttgcgagatttgtcgggatggaacgctcatcggatgggcagtttcatccatttgctcggaaatcccgcgtaatcgtttcaccgtattcctcatgttcaagtccctcatccgcacgtttgccattgtggcggccttcatcgcagggtatatgatgcccggcctgcatgtgtacagctggacattcaagtggatgctggtagtaatgctgtttgtaacctttctgggcatccgcttcaaacgaatgaagccggaacgggctcactggctcctgacgggggctaatctgatggtcgccctggcggcatggggtgtgtgccgccttgtttttggggatgggtatctggcacaggccgcttttttcgtaggcatcatgcctacagccacggcggctcccgtggtgatggggctgctgggcggcagcgtggagtttatgctgaccgcccttttgctgattaacggtattatctgcgccttgctgcctttcatcctgctcgcggttgttgggcggggcggttttgagatttatctgaacgtggcccagaatatttccttggtaatgttgcttcccctggctctggcattggcggcgcggcgtttttatccgcgcgccatcgcgtggcccaggaagttgaaagacgtcacttttggcatttgggtggtgattctggttttgatagccgcaaacgcctcttatgatatttcctcccgtgagggcatttcggaacgtgttttggaacagattggcgtgattgccctgctggtttgcggagtcaatttcgggttgggatatttgctggggggacgcacgcgcgctgcggagtgcagccaggcattagggcagaagaataccactctgtccatttatctggctttgacgtatgccagccccattgccgctctgggccccacgttttatgtactgtggcataatttatggaatgcctggcagttgtaccgcgcgtccgaacgaaagcgcagggatggatgaggaagggggcatccggttcggcggaaatccccggcagaattatggggatttccatggtcggaaaaacgggagggagggttcttttgagccggttccaagtgacggcaagcagactgttgaaggttcttttttatccactttcaggaaaggcctaggatttctccccgagcaaaaagcttgaaattcggggaacacccggtaacgttatgcacttgttatgcaggcgtcttctcctttgccccctctgtctccgcgtaccaagtggctgattgccctgtgcttgtgcgtgcttgtgatgctgctggagttcctgacgtaccacatggcgtaccgcatcggctatgatgaagggatgctgactactccgccggtggtggtgcagaaaagcgatgaaaaggccatgcagaatttgtcccgcttcatggcggatgtttttgcttcgcgcgagagcctggccggcattctggaccaccgggaggaacgccttgcatggatcagggatccggaactgcggacagaaacggcctggggcctcacccgtgagctgattagccggggtggcgtcgttcctgctcttcctgcggccagggaattaattgacgccggatacgccgccgggcgctatcaggtatgggctccccgtgcggatgccgtggcaaaggctctgttggcggagcaccagtacacttccgcctacgattatttgaaaaccgctgaggagggatatgagaaggaaggaatggctgagccgctggtgcggacgctccagaccatgagttctattgaccagatgctgaacaggaatgaacaggctaatatgttgctccagcgtgcggtggatgccgctgcacatctggggccggatgccctccctgtcaggtccaggcttttagccgcccagggaaggctggcacgtactacggggcgcattccggaatcgcgcgagtatttcaagaaggctctggctctttgtcctcagccggacaagaccactggagacctggccctggccagcatcagcatgggggaggccatgttggaagccagcaggaaggatgaggcacgggaattgtttttaaagggcctttccggctcggaaaatgcctcttacctgttgaatgactgcctcaatgccctgcgcggtctggcccgtatttctacggagcaggggaattatgaggaggccctggcttatctttaccaggcggaaggcgctgcccgcggcgtactgccggcggaccatgccttttgggccgggttgtatgatcagagagggtgggtcaacatcttgcgcaaggcctctccggaagcccgggcggattttttaaaggccattgccaacagctcggcttctcccgtcatttccgcccagtcccgcgaagggctgggcaaggcgtggctggatgccgggggggggggcaaggccagggagaacctggaaaaggctcttcagttgcggaagtcccatttcgcctcggatcttctgtccctgggccgcgtatattattccctgggacttgccagcgatatggcgggggacagggagggcgccctgactgcctatgccggagcggtggattctctgctgaaatgcgtggagggggcggaacgcagggatttgctggttcagtcttatttgtgtaaggcgtacgctctgtgtgacggagaacaatggaaggaggcggcagaggcttttgaggcggttcttcccatgctggaaggggaacagaggtcggagaattacaaacagcttggacgctgttatgacgaactgggcatgaaggagaaagcggatgactgctggaaggaatccggttttccccgggtgcgcatggcatcccccgggcgcagaccctccgtgaactccagatcttcacggaggtaggatgcgagggacttcgtaagacgttgcgaggcgtttattttgcttgatttgtgccgtctttttggctcaatgcctgcatgagttccgagcgccatttttccagtaagccctaccgccccgcacgcaagaaaaagtcttattggaagccggtcctctttttggtcctcctgggaggactctggttcggctacatccagtactggcctacgatagaagggtggttcaagccgaccattcatgaggtgcacagccagacgcaggccatggggcatttgcaggatatgctggcttcatggaacggttccgatgcagagctggcgcagatggcagcctccgtggacaagcaggtggaatggatgaattctcccgaagccagagattcctttgcatggcttttggcggtggaaatggaccggcgcggcatgctgaaagaatccgaacctatgctggctgctcttctgggaaaaaagctggctgcttcctcctccatgacggcggaggacaatacccgccttctgggcgtcagcctgaactgggcgcgggaattcgcccgccgcaagcatgatgctgtggcggaaaagctttatgaagtgattttgaaaaatacgccggaagaccaggtttccatccgtttagcgtgcttggagccattaatccattatgcgtacgaccaagccaggtttgagcgtttttccgcgttgtgcaagcaggctgtttctcctgtcatgaggagcatgctgaataaaccggaggatgtgaagagcatggtgaaaatcctgttgcttcaggatactctgccagacaagaccaccgggttgcccggtggcacagggagtgcgattgcccgggagcttcttactaaattccgcctgaccgccaatccggacatgggccgcattattctgaatgaactgaagatgccgctgaacacgcgccggaagtattcccaggaggaattgaaggccatggccgaccagctggaagcggctctgatctgcttccgtgcagctgaaacggagatggactgcacgccggagacaatgcttgccctggcacgggtaaggatgcagatgggggatttgagagaagcctcccgcctgctgtcccgtgcagaaggggctgccatgacgcttggcgtggatgctccccgtattttgagcggctccagcctgagccaggatattgcgtccatgcggtcccagcttgaaaaatacagccaggcagaggctttggtgaaacgggcttatgaagatgtgaatgttgccgcagctttcctgaaggcgcgggattacgatcaggcggtaaagtatctggaacaggcaatgaaagtggctcgtgaaaataccacgtttgttcaggcacttcagccggtcattctgaatcttcaggcggagataagcgcaagcagggaacaatgggctctgtcggagtcccaatatggaaagttgattgcggagtgggatgcgttgactccggaagataaggaaaaactccggaataatctggcctccatccagttgggagagctttacaatgaaattcaccgcaactgggctggtgtgtgcctcaagcaaaaacgaaccacagaggcccgcagggtgctggggaagataggagaggttccggctgaagaaccggagaggcctgcctcgcgccgacgccgcagatagcagacccttgcttcagttaggccgttccttttttggaaaggaaaagttatccattggcagatgccggaggggctcagagttcccagaggctccggtcgggagcttgactaaagcgggatacctgcggtcagctgcgtgaggctgaaggggctttttaaggaaatgtgccgctttaatcccttgacgtcatcaaagagctttggcacaggttccgtttccctgtatcgacggatacccggcattctggagagaaagaatggattttaggccttcaacaaattatttgtctctttttggggcaaatgtaacgtttccggtatgatccatattctcaagcagagctgaaaaacagcttctgcagaaccttcagctgcggactttggctttctgtcttacatggctgagagcccttttcccatgaaccattttttcacggcggtcagctgcggattgacggcgggagcgcacagtatattttgcgaaaatttggctaaccgtaaggttgccctgttcgaaaagtttgaaaatattatctctcaccctcatggcttcctgaagcgctgcgtcagcgcccccgtattgagaatcggagaaataacgggtgaataaacgcttgttcttacagatcgccaaccgatagccctgaaaggccgttgtttcgtaagtgtaacgggtgatgtttttacaaggcatatgaacagaagttatgggaccgggtgatagaagcagtgataagcttctattagaataggttccatttcctgtaaaatccagaaaaaacacaatttgttagattgagtgcaaaaaatgcactactagatgcttgtggacaggttattgtggcgtgtcatccctgacataaaaacaaccgtcggaaacacggattttcaatttttcccctgcatgcacctggtttgtctgccggataagctgcttatcctggttttctaccagggcatatccgcggcgcagggtctgttccgggctgtgtgcttcaagacgtgcttgaataagagtgagttgtgaagataaatccgtcatgcgggaggcggctgcatgggataaaccggcctgaagggaagccagaagctgtgtgcgctcccggttcctgtgggcggggtggcgcatttgcagctgatgttctagtttgttaatatgcagcgtgttatgaaaaactctcgtggttgcggcattctgcagggtttcttccatatcgtccaggcgctgggaataaggagagagcagggaatacgcatccaacagcttcccccgcaggtaaacatccagtttcagcttggaacgcaagagggaatgccgagcggatgcatgaagagcctgttccattctggacagcttgcggagccattcagggccgtccggtgtggccagttctgcggctgcggtgggagtgggtgcgcgcagatccgccgcaaaatcggcaatggtgaagtccgtatcatgacccactgcggaaatcacgggaacggtacattcgtaaatggcgcgcgccaccgtttcctcattgaaattccacaaatcctcaatggagccgcctccgcgtcctacaatgagcacgtccacgggcgggagaccgttgaagggcgctccggaccaagcgcgcacggctgcggctatttcgtgctccgctcctgccccctgcacgcgtacgggcagcagataagccttcacccacggggcgcggcgttccaatacgtgccgtatgtcctggatgacggcgccggtgggggaggtgacgatgccgatggcgcgggggaacgtgggaattttctttttgtgttccgcgtcaaacaacccctcgcgctggagtttggctttcaactccaaaaagcgagtctgcaaatctccctgtcctgcagcttttacctgcctgatgaccagctggagttgcccccggtccgggtatacggtggcgctgcccaggacatggactttcatcccttcctggagccgtatggggcatttggaagccgctgccttgaaaaaggcgcagaaaatttccgctccctgttccttcagggtgaaataaacgtggccgctggtgtgatgcttgacgttgctcagttctcccaccacccactgggtgcccacagcgatgctgaccgtgtctctcaggcggtaaacgagctgtttgactgtgatgggtttgggcgcggcgggcgtttcctccgggaattccataaattacggttcaaaggggatgttcagcgcttcatacgccagcatcctgcattgcttgatatccagcttgccggatgggagcaccgggatgcgttctacgggaataatctccttggggcaccagagggctggcagcccctggtcaatcaggccgtgcctgatgagggtgcgcgcctggtgcacgtaatcagtcaccagggtggtgagcagggctacggcctccccttttacggggtccggaatggtgacgacggctatccgccgttcttcgtccgccggatccagattccaaatgttcataatggctgcttccagggcttcatgaggcaccatttccccgcctattttggaaaagcgggaaatgcgtccttcaatcttcaggaagccgaattcgtctgcggaacctatgtctccggtttttagccagccgtccacgaaaatatcgcgatccgtctccggaccgcccagatagccgggaaagatgttcggtcctttcagccagatcatgccggaagtagtgatgggaaccacgcgtcccgtgtgagggctggtgatgcgtatggcgattccgggaaggagggctcctacggaactctttttcatgccgggaatgaagtctccggcggcattggatggcgccgggtcaatgaagttgacggaacagacgggagaggcttccgtcaggccgtagccttcgcatggaatgatgccgaatttttcccggaaagcggcggaaaggtcttccggcagtttttccgcgccaacgatcaggtagcggacggttttaaaggtgtccggttcgcagcgtttcatgaaaccgcgcaggaaggtgggcgtggtgactaccagactgattccgtactgcttgataagggctcccagccgtttggcctcaagaggggatggataggtgaccatgtcgtatccgccgatcatcggataccatagcccgatggtgatgccgaagcagtggaatacgggcaggcttcccagaaacctgctttgcggttccagcgtaatgcgggaggaacattgagagatgttggaaagaaggttgtggtgggtcagcggcacgcccttgggttccccggaagagccggaagtgaacatcagcacggcttcgtccgcgcctgtaggtgcgtccagccccagttttttaatcatgaaccccgctgtcaggaatttgatggcgaggccccagcgtttggcggaacctttaagcaggggaatttcccgctccatgaggatcagatcccgctgggggggccacgggaaattctggagctttcgcatgaaggtatccgcagtaataaaccagtccacgccggattgctttacagagctggcaaaggctccttccgaggcggaataattgaaattcaccggtgttttcccggcgaacaggcagcccagattggctatggccgctcccttgcccggcggaagaatgatgccgacccggcgattcgaggtaatttttttcaacctcttggcaaaggctacggaaatggccagtagctggccgtaagtcagcgtagtgtcgtcaatgccgtcgatgacccggcaatcggaatgaagtctgaggctgcggaaaaggagggcggacagggaaccgtggagctgaggcagcgtggcgtatgcctgggcggaacattccagccacgcggaggtcaggcgtgctgccatctcggccccgggggccagtttggggagaatatgtatctggatgtccgcctgggcgtccgtatcggcctccgcatccagcacggagttcgtataaaaaccggcatagaccggtacgggggagatatgcagggcttccagggccttgatgacccgcggaggaatttggctgatggaacctttcacatgggagacgggaccgggtagaaatactacttttctgccttcgttaatgcgttccatgatggcggaacgcagcgcgacagggtcgctgcctccggcctggaacaggatgccgtccgctttagtggattccagatgggaggcggtggccgtatccggggggagaccttcttccaccaggtaagtcatgcggtccctgcccagttctttttcgaacatcagtagggttttataagatactttgttgaagatcaacagatcacctgagtcggataaattggaggaaccaaaaatggccatgggaaaaggataaaaaatttgcttgaagcattttagcaacttgaagagccgggagcaaggaggaaaggtgcattcccggttgcttttcctttatccggacaggtcttggaagtctttcccctctcggtacgttttttatgggaagagtgttgtttttcatgggattgcctggatttggcgttatctcctgcgaaggagtttccgcaaaccagctgttccgatatttacttactgatggatgggcctggtaggcagcaacatcttcggacgagaagcgctggcggaaatccgcgtaaacgcggcgcaggacctgggagaccggagaggggaaacgaacatctctctgctgggcaaccccggcttcgcgcaaagcgtgaggggggcgaaagtgggaacgacggcgctgcagctgggagccggactgagcgtgccggtgggaacgaagggaactatcttcgtgaaggggaacgcggacatccgggacggggctgctcagtaaacgggacgtatcagctactgctacgatttctggtctttgctccgaacttgttgcgggcaaacaatacaccctctttttctatgtatgaaaggtgaaattcacgaaaggtgttattttgctgcatcgtttgttcaggaatggggaagggatgaaaaataatttttgcgtccatttttattttcatgtgaaatgttgcattgcggattagcaatccgcagaagcattatccagaaaatagaccagaatcagatatttttgatgtttataatgaaagagatatggaatgtttttttgaaaaaattctgaattggatattaagaagatgatgatttccgggtatgcaacaggcattggatcaatgttgaatattgacggcggattgctaattcggtaatagctatatattgcaaacagccaatcaggacggctggatagctttattatttacccatatttgcaagttatgaagttacgtctaccgctcaagttgttgtccgccttattgtcgttttatgccatatccggttttcatgtgttcgctgctacggagtgggacggcagcagatattccggtaatatctatacgtgggtagggagttcgtccaatgattttcataacggcggcattgtcctgaccaatccggatggaacatacggtcctgtcaatacgaattggggttccgtttcagaggagggaagtatttggaacctttttgccaatgaaacgggactgtcggaatataacacattgcgctttgtcgcatcaggcacggaagtgggcgatgtcaccgtatcggcgaccaataaaaatccatcctgctcctttacgccatttaccatggggggattgattgtggaggaaggggcatcagggttctcccttgtcccgaacaataatgcccagaggactcttatactggggagagcgggtacggaagagccggtattatttacggttcgtgaagatttttccctgggttcttcctccaatgcatggggcccggttaatgtgaatgcagactggaatgtccttgtggcaaatggcaagacgctgaatgtttacggggcactgaattcttccggacggaccattacggtgggcggggaaggattcagcggtacgttggttttaaacaatgcggccaatgcatccatgactgctgaatgggtcatcacctccggctctactgtaaggtgcatgaataattccgctttgggaagcggccttgttacgctggatggggggacgcttgattttaactcgcaaacgatcggatcaaccattacgttgaacatgagcgggaccgggacattgcagaatgtgacagttgatggagcaattttatcttatacgtcttcatcgggaaatgatgggattactgcttcaaataccacgtggacgtccgggaagatagatattgggcgtttgttgcagggatttagtgccgaaggttccaataccgttgatttgggagcggagcttggcgagggctttagcgtactgggcttagatacagggcaatacagaatagaaggcagcgtgctgacgatagaagacggggcgatatccagcgtgacgtgggtatctgcgggagaaggaggggaattggaagaaacggtcaagaacgcctttacgctggctcttggggaggggagtgcggccaacgtcagcctgggatatctgaacgggaccctgacgaccagcggggacaaagtctatcaaatcaccaacaccggcggaactaaaatcaacctgtccggggtatacaacagcggggcgaccctgccgtccggcaacctcaactaccagggggacatctggatggacatcaacggaggagcattcggcatcatcgccggaggtgtcaccaatgaatggggcaccaacctccagaccagtacgctgactggggacacccatgtgcagatctctggaaaagccacggcggaacacgtcatcggcgggaacaacaagggagcaagcactaccctgacgggaaacaccaacgttaccgtcaaggataacgccatcgtggcgggagccatcatcggaggaagcacctcctcccacaatgccgtcaccaccatcacaggaaacacgagcgtcctggtcaccaacatccagcacagcaacagcgcgaccgtcaacctgggagacttcggcaacgtcacagcccaaaacttcatcacgggcggaagcgcgtggacggccaaccagacttcaggaacgaccatccggggcaacacctcggtaacgattaatgtaggcgatgcggaactctccggcacggaagggcacaacaacttcgtcaaaaacatctatggaggcagttacgcaaacacgaaatccgagggtaacggagccgtacaaaaagtggaaggaaactcaagcgtctccatcagcggaaaagaaggaatcaccttcacgggaaacatcatgggcggctccttctggaactggggcaacggcacgacgctgaccaccaacggaaacaccagcgtctccattgacggaggctccaccttcacgggcaaaatcgtgggcggctcctggagaggaagcacgtggacggcggaagatcccacagccctgcccgtcagcattggcggcaacatcaccgtcacccttggacagggcacctacctgggagacatctacggggcgggcaactgtggcacggtaggaggcgaagtccacgtctcgctgacgggaggaagcatctttggggcggaaggagaagaaagcggcatcaccatcggcggaagcgccggagcggcggtagaaggaaacaggacgctggaactcaagggaacctttggaaccggggacttccaaaacgtcaccttcacccggtttgatgaaatcaatatcgcgcaggaaggaacctcggccaccatctacgcgctgaccgacagcccggccctgaccaaaacgggagcgggaaccctgacactcggggcggacgcggcaggagcggaaaccatccttgacggaaccacggaaggaatcaccatctcggaaggcagcctgaacctctccggcgccggcggcagccatatgaaaggaacgtggaacatcgcctccggctcccgtctcaccggagtcagcggaaccgtaaccgtaggagaaggaggcctggacggactgaccatcgccctgggaacggaaaacatcggccaggacacgcaggcgtctggcgccgtcatcagcaacggcagcggaacgggaagcgacccgaacctgtccataaagggggaagggctgacgctggacctgagcaacgacgccgtcgtcaaccttctgctggaccacaaaaccgacgactcctccagctacctgaccctgaccagcggaacgctgaccgtcggcgacctgggcgacatcgccttcactaccgaccttctgtccaactacggcatccgggtcaccggaacggacggaggcagcctggtgctcagcggagcggccaccggcctctaccgcgtgcaggaggaagaaggaaacgcccatgaagtcaactcctatcaaacgctctccggctacgccggcgtcgtcatcggcggcggccagaccctgacggtcaacctggccggagccccgggcgaatccgacggacagggagctaaaatcaacaacctgatgggagccacgggcagcagcctggtcgtcaacaacaccggagacggcacggccgtcgtcatcctcaacaacaaacaaatgacgacgggagaagacgacatcgacccggccgaccaggacaccgtcatgggcggcagcatcacgggaggcaacaacgtcgccttcatcaaggaaggaaccgggacgctgacggtcggaggaacgatggacgtggaaaccctcgccctgcgtgaaggaaacatcgtcctcaacggcgcgtcaaacaccctggacaccctcactctggaaggaggcggcctgaccattaacggcaacgccgaagtcggaaccatcaccggcacggaagccggaggctccctgaccatccagggaactctcaacctgaccggaacaggcgaaataaacgacggctccatcaccggaaccggcaccctccgcatccaggaaggagcggaactggccctgggcggagaagcccggctggacggaacctcagtcaccgccgacggcacgctggccctctccggaacggaatccggcaccatcagcagcctctccggcagcggcaccctgtccatgaacggaggcagcctctccatctcctcggcaacaacctcctccggaaccttctccggcacgctggcaggcagcggcaccctggacatctccgggcaagccacccaatacctgcaaaccggcaataaggactacgacctcgccgtccgtgacggaggcgtcctggtcctgaaaggcaccgcggacgcccccacgctgaactacaacagcatcaccgccggaaacaacggcaccctgcgtattgaagccaccggggacgcccagggcagcgccaacaccacgctcaacgtggaaaacatcaccttccagaacggctccacgacggaactgatctacaacttcaaccaggacgccccctttggcgcccccatgctgacggcgggcaccatcaccgtgcaggacggagcaagcttcctcctctctaacatggaaggaaacgccgccatgaacgcggggagcgacctccatgacgtcgtcctgatgagcgccaccggcagcatcagcggcctggaagacgggcagagcctcgccgcccggatatccggcctcttcgccgtctactaccaggacgccacgctgagccgcgacggaaacgacatcctgctcaatgccacactccggcaggaaaacctcttcgcctccgcggccgacacgtggaactccgccgccggagccagcctgctctgggaagcccgcaaaaacctggaccccgactcccagctggcccaattcatgaacggcgtcagcaccatgatcaatgacggcaacctctccggagcctcccgcgccatggcggcggcagctgggagcacggtcaacgcgcttgggacggcgcagaaggacgccctgcgcgaccagatgggctggatcaggaaccggaccaccctcatgggagtcaacccggcctacgtcaacgacgacctcccccgcttccacatgtggatggaaggcacgggctcctacgccaagctcgacacccgcggggatgaaagcggctaccagctcaccacctggggaggcacggtaggcgtggacgcggacctcagcgaccgcctcacggtgggagcggccttcacggccggctacggcgacctgacggctggcgcggcggacagcgccgacgggcacctggacagctactacgccagcctcttcggccgctaccaggacaggcgctgggcgcacacgctcatcctgacgggagggtggaacgacgcgaaactcaaccgtacggtcaactacggggaaggaagctacgggacgcagggaagcaccagcgggtggggctttggagcgatgtatgaactcacctacgacgtatacctcaacgaaaaccgcagcagcgtgctgcagccgctgttcaacgcctcggtggtgacgacgcggatggacggctatgaggaaacgggtgcgggcaacgcgggcctgaacgtcggcaggcaggactggacgacggggacgctggcgctgggcggccggtggatgggcctggtgggcagcaacatcttcggacgagaagcgctggcggaaatccgcgtaaacgcggcgcaggacctgggagaccggagaggggaaacgaacgtctctctgctgggcaaccccggctttgcgcaaagcgtgaggggggcgaaagagggaacgacggcgctgcagctgggagccggactgagcgtgccggtgggaacgaagggaaccatctacgtgaacgggaacgcggacatccgggatgggtccagcgcgctgaacggaagcatcggctaccgctacgacttctaacaagaaggaaaacacaaggagggggccccacccccgaaaggccttcctcctgaccctccagagccgttccggaacaactccggaacggctctgttgcttaggggaatcccgctaagccgatacggtgcggggaggtagtttttacaatatattggaatgatttttattaaaattgtttttttcaccgcaatcgcttgaattcgtaaagcggattaaaaattcgccgtgtaatgggaaccgggccaatataccagagttgccccgcctgtttgcttatactgataaggatagaacgatggatgtccctgattccagaccagataaagcatgaaaatactcttctggatgatgcgcaacacctacggaatcaatgtttaagcttgtaggaggatttttaatccgctaatgatggtaaaaagcctcctgtcagtttcgggaggaatttcacatacgcccttttaaaaactatgaagttgcacctccctttaagtcttttgtcctccctgcttgcctgcatggctgctgtttcctcaccgcatgccgttgcggaaacctatacatggctgggggggacggtggatgttcatttgaatactaactggactccggattacggcagcagcaactggtcggcaacatgggccggaacggcgacaaacagcatgcgttttgatgcgggtagcatgacggggcaggtcaaggctctccaggcttctttcaatacgctttcacttgggggaataaccgttacggataattccgatggattcagcgtttccaaaagcaacggctccaaccgcactgttaatttacgtgatggaggagaagggtatacgctgtttgacataggcggggatttttctctgggagttgccagccaggtatggaacggagttgttttcaactccagcgccctgtttaacattgcctccggcaagaccatgaatatttacggtggtctgggaatggctggaacgggagccaggacgatgacggtggggacggacggttttgcgggaacccttatcctgaatacggctgcccagtcttccatgacggctgattgggtcatttcccatggggcgaccgttcaactgaacaatgccgcggctttggggtccggatcggtcagcttaaacggcggcaatataacggcccagcacgatgctgtttataacaatgccctggccgtgagcggttcttccggcatgaacgtgaatgctgccacgcggtttgccagtgtcagtctttccaatgccgctgtcctgaacatgaacggagggacgcttggcattgcgaatgctagcgttttgacactgggttcttcaggtaccattacggggaatttgacgctgggaaacgcgtctcttctgaatttttccgctcttccggcttccggagcatatttgcttaatgtaacaggaacgctgaccgtgggcagtgaattgcttctggggcagggaacgatggaaggcgtagcctggacggagggttcctacagtctggttcatgcgggttccgtagagggagtccctgccagctctttcgttctgggcgacaatcttctgggttcatggagcacggaaaacaataatcttaccctggttgtggagcaggtggctttgcttgaatggaaaggcggcgacgggatatggtctgtaactgctccggcttcttcaccgtggaaaaatgaaggtgtgtacaataatgcttccggagtggtcatgggagatattgacggaagttctctgcaaacagtaaccattgatggagttgtctctccctcaatcatgatggtccaggcggatacgacggattatgtgtggaatgccgcagatgaaggaggtgctctggaaggcagcggtaatctggagaagaccggcagtgccaagctgaccattaatatggataatgctgattatgccggaaaggtcattttggggggtggaacgcttgaaatggggaatgatgccgctttaggcacaggtgatctggcatttgacggcggtaccctccggtatggaacaggggtaacggcggatatttccgggcagatttccacaacgagcaaaagttccgtgaaggtggataccaacggtaataacgtaagctgggcttccgcggatcattacaaggctctgaacttggaaaagtccgggaacggtgtgttgactctcggcggcgccgtgtatacggggggcctgacagtagatgaaggaggcgtgtccattacttccggcagtgttcaaacgaagttttctgcgggagtcacggtaaatgcaggaggaacgcttgccatttccagcaccattaacggaatatcgaccggagacaacgccaatatcgtcatcaacggcatgagcggagcggggcggattgagctggacaaccaggctgccaaatcccgtttttatatttccggagataattcttcctttaccggggaattggtggcgaccggactgaacaataatccgggaaatacgaatgatgcccgcgatcttcagtttgccactgctgccagtatgggaagaggaacggtaaccctgaatggacgcgggttctggctgggaaccgccaattcggcggataccgccgtcatggcagcaatcaatgttctggagaaaggttcctatctgaacgggggaagcggaaattcctattactttggcggggcgtttaccggttccggcaccatgaccacggctctgggcaatgcgttcgcatatttgacgggagatatgaccgggttccagggagcattctcccacacgggtaattccctgtttacctgggcattcggcaacaatacggaggcagttctgaatgatggaaagcttttcggggatggagtggttttgaaggctgacggagggacaagccagtttaaattctcctacaccaacgatattatactgatgaacgccactgtaggcgcagaaggggccttgaacgccagggtggaacaggccggaaccggaacgctggtgctaacgcaggacaatagcgcgacgggaacgctcaccattaccagcggcacggttcagctgggcaatggagaggtttccggctcctggacagggcagattaccggagcaggggctctggtggtggacaggtctgcaggttcctctgctctggaactgaactccgccaacgattatcagggtggaactacgctgaacggcggcacagtgaaggcgttgggcgccggttccctgggaactggcgatgttttcgtcaacggcggttccatcctggatatgaacggacaggcgattgccaataatgtcgctattaccaaaggagggctgcaacatgccggggcctacgccacgtcgggcggcgtaaccgtaaatgcggaggctgattccggggacattgacctgggaggcctgtccggcgacaaagtgggaggcatcaataccaccacggcgggaacggccattaccggcctgacgggaaatttgacgctgacggggaataatgccctgcatgtgggggtggaaaataccacgtatgcttctgacggagaccagaaaagtctgattcagttcaatgatgcggctacggggactgtttccttaggcggagattcttccgatctcacgctgcacatggatattgatacggatatcctgattgccatgcgcgaactggattctgtcggtatcctgctgacagacgggacgattaccggattgccggacagcggtctggtggcgtggctcaaccagcatcttacgtttaatgccacactggaaagcctggggttcggcatccagggagtggatggaggaaacattatcatttccggaagaacggaccagatttacattgcttccgtagacggttcctcagtgacggaaattccggctttgaattcctatgctcaggtgattgttgataaggatctttctctgaattttgatgttcccgcatctaatacggacaagaccatcgttcgtcatctttcctccggcaccagcgctactggcaatctggcagtgaatgtcgccggagaaggttccttgaatattgaactggccaacgatttggacgattccgtttttaacggaaatcttatcgtaaacggaaacggtgcggacctggtcaaaacaggagaaaagacgctggtgttgaatgggagtgtcagtacatccaatgcagtgattgccaaagaaggcacactggttctgaacgggagcgtcaacaacatcggcacgctggctttggcctccgcttctgcagatgcaattgcgcgtaccgtgattggtgggactgtcacagccactctgtcggatgaagatgaaggcggttccctggagattgctgcggggggaacactcaagaccgccggagattccgtcctggaccaggcgacctccatttccggagcagggagtttgaatattcaggaaggttccgccctctccctgacggggaaagccgtcctgtccggaacttccgtgacgctgaacggaacgctgggtctgtccgggactggggaaaaatccatccagtccctctccggttccggaacgctggcgttgaacggcggcactctgtctgtcacttccgcttccgccagaaacggttctttctccggtacgctggatggagagggacgtattgacgtatccggcagcgtaacccaggtaatgcagacaggaagctctacgtatgacctgggcgttcatggaggggggacgctggtattaaaaggcacttctgccgcccctgcgcttgattaccgtaatgttgcagtaggttctgccggcaccctgcgtattgaagccattgggcatgaggccggagactccaatacctccttaaacgtcggcagcattgattttcaaagcggctctacgacggaattcgtttataatttaagtgcgtctgatcctttcggttccgctatgctgacggcggattccatcaccattggaaatggggcgggattctctcttgccaacatggaaggcaacacggggctgggaacgtatgacaacctggacggcgtggtgctgatgacagcggacacgattgacggactgacggagggggaatccatgtccgtggggacttccggcctgtttgccgtttattacaaggatgcgaccatgagccgggagggcaatcatattgtgctgaatgccacggtgcagcaggacaatatttttacacctgcggtgaattcccataattccggagcaggttccgaacttctgtgggaggcaaaaaataatctggatgccacttctcagcttgggcaggcgatgcattccatcagcaccatgattacgggagataatcccgacttggcgggggcatccagggctttggcagcagtggcagggagcacggtcaacgcgcttgggacggcgcagagggacgccctgcgcgaccagatgggctggatcaggaaccggaccatcctcatgggcgtcaacccggcctacgtcaacgacgacctcccccgcttccacatgtggatggaaggcacgggctcctacgccaaactcgacacccgcggggatgaaagcggctaccagctcaccacctggggaggcacggtaggcatggacgcggacctcagcgaccgcctcacggtgggcgcggccttcacggccggctacggcgacctgacggccagcgcggcggatagcgccgacgggcacctggacagctactacgccagcctcttcggccgctaccaggacaggcgctgggcgcacacgctcatcctgacgggagggtggaacgacgcgaaactcaaccgtacggtcaactacggggaaggaagctacgggacgcagggaagcaccagcgggtggggctttggagcgatgtatgaactcacctacgacgtatacctcaacgaaaaccgcagcagcgtgctgcagccgctgttcaacgcctcggtggtgacgacgcggatggacggctatgaggaaacgggtgcgggcaacgcgggcctgaacgtcggcaggcaggactggacgacggggacgctggcgctgggcggccggtggatgggcctggtgggcagcaacatcttcggacgagaagcgctggcggaaatccgcgtaaacgcggcgcaggacctgggagaccggagaggggaaacgaacgtctctctgctgggcaaccccggctttgcgcaaagcgtgaggggggcgaaagtgggaacgacggcgctgcagctgggagccggactgagcgtgccggtgggaacgaagggaaccatctacgtgaacgggaacgcggacatccgggatgggtccagcgcgctgaacggaagcatcggctaccgctacgacttctaacaagaaagaaaacacaaggagggggcccccacccccgaaaggccttcctcctgaccctccagagccgctccggaacaactccggaacggctctgttgcctgaggaaagccccttggggcggcccggatgggccaaaaacaaaacagcggcaagaaaaaaaaatacgccgtccccacggaagccatggccctttttcccctcgtcccctcccgtgaaacgcctcatcctctcctcaaatctgtaaaaacgcgccaaatgtttccggaagccctctccgctgtccggagccggaaaagaacggaacgcgagcaatagggccttttttatgcgatttcagcggttttccattccaataccgcttccgcccgcagttcatctccgtgcatgaggtggtgggtggtgagggagtcccggaagaacagcagggatttcatggaatctcccgcatgggtttcttttctgaaatgcaggtgaattcccgtcagttggtggttctttagccaggagtccggaagggagtccagagcccagaccaggtaggcggcattgttgatgtggcggttgaaatccgtatcccggcgttccgccgtccattccctgatcatcggcagaagtcccgaaatgtccatggataccggagccaccgtttctttgcatggggtatccgggaaagagctgatatgcctgtttaatggcacaggacgcctgcggcgtatgtcaatgacagcccacagacagcttgctgcaacgatgcagttgccttgggcatccctgatttccaggttgcggcgcgccagcagaggcgtttcctgggccgtccaggttcggagttccaccgtttccttccaccggggaaggcggctgacggccgcatccatgcgcacttccacccaagccaggttgcgggacgttacgaaatcatagccgaaacccaggcaggaggcatgggcttccgctatttcttgaaaccagtgcagaaccgtttccggtttcatcaggccattcgcaccgctttcgtaagtgcggacggttgcctgaacggaatagatttccttgttgctggcatgttccataacatcttatgctagcggagccgttctttcggagccagtcaaaaacgggtaatatccggctgtttggcatgccgcacccccggtaaatgaatggccccgtaatttccgggctgtcggcatgcaatagaaattttgtcagcagccgctgagattgacttaccttatttctagagaatgctccggaaataggcgatggtcttttccaaccctttttccagcgtaatatgaggcttccaacccagcttttcttttgccagccgaatatccggtttgcgttgggtcgggtcgtccaagggcagaggacggaatactgttttggaagaagagcctgtcatttcaatgactttttccgccagttccagcatggtgaattcctctggattacccaggttgaccgggccggaaaaaccttccgtatccatcatgcgcaccatcccctccaccaggtcgtccacgtactggaaactccgggtctgtttgcccgttccgtaaatggtgatgtcttcccccttcagcgcctggacgatgaagttggagactactcttccgtcgttagggttcattcgcggtccgtaagtgttgaagatgcggatgatgcgaacgtccaccccgttcatgcggcggtagtccatgaacagggtctccgcgcatcttttgccttcgtcatagcaggagcggacgcccacggggttgacgtttccccagtaggtttctggttggggatggaccatgggatctccgtatacttcgctggtggaggcctggaggattctggccttgcaccgtttggcaaggcccagcatattcagagcgcccagcacggaggtcttcattgtgtggatggggtcaaactgataatggggaggagaggcggggcaggccaggttgtagatttggtcaacttccatgacatagggaacggtaacgtcatggcgtattacttcaaatccgggataatccgtcaggtggaggatgttttgtttgctgcccgtgaagaaattgtccatgcagataacttcatggccttccctgagaagccgttcgctgagatgggagccgatgaagcaagcgcctccggtaatcaaaatccttttgctcatgatggcatgtccgtgcgtttgttcgttccgccgcgccggaagggaagcaagcggaaagttttcccctgtccgtgcgttgcggttcaatgtcacatatccgtcacgggaaggcaagcgcatagcatcccggacgggatattacagggatgtccgggaaaggcaggggaggaaccaggaaggtttttccgtacggaccgggaggcgaattccggttggttcccggctgtcccgctggcaggttcaggatttgggaatcgtcagcagaaagctggctccccccagggtgccgaattccagtttcaggtctccccccagggaacgtgccgtatcccttgccagcgccagccccaggcctacgccgggtttccggctgttggtagcgtcttttgtgcgccggaagggcttgaagacaagcttgcggtttttcggggaaattcctgggccgttgtcgcggaagcggatgacgatgttgtggcggtccgcctggacggtgagctggactttggcgttttcccccttggcgtatttaatggcgttggaagtcaggttgtccataatctgctctacggaaacggcatccgtatgaataggaaggatgcggatgggctgggccagggcaaaggagaagctgatgtccgcctcccggaggcggcgttctattttttccgcaatgggttcaaaaagctcctgacaggtgagcgtgtcccgcgcgcggcgaatagcgttccgctgaagccgggagtaggaaagtacgttttcaatcaggtgttccagacggcggcattcccgctgcatgttggcatagtattccggctttttctgttccggcaccatgccgtcttccagcatttccgtgtacagggaaaaggacgtgaggggcgtccggagttcatgggtgacggcggagacgaagtccccgcggcgctgttccaggcggaaggttcccagcatgagccagatgaccccagccgcacccaggagcaccatgctccagatgagggtgagcgtccaggtcagcatttttttgtggtcctgaagaggaacggctccggtgtctcccggaaggaaaatcagaggggcgttggcaaaggggagtgcgcccgcctgccgggtttcctccgggggcggggaggacgggttaaaggttgccaggcggctgtggggaagcagcatctttacctggccgggcaggcgtctgttcagattgtccatgttcatcagggccccctgcaaataaatgccgcggctggtgtgcacctggcgcaggatgtaaaggttccctccgtcttccacgggaacgaaggaagtgacagtttccacttgtgccggagagccggataccgttggctccggttccggagattcatgcaaaatttcattccggatatccgtccagaggtttccgctggacggaacggaggtaagggaggagaccttgccgttcagccgctggtaaaggtccttctgttcattcagccgcccggcaagctccgggggaagagcggggccggttacgcgcccggcaggggaaatctgaatgaaggctgtaacgtagtccggcaggtaggcggcgagattggaaccacgggttgcttctccgggggccggggcgcccatcctcaggtcataggggcgtttgtaggcgtaaacgggctggtattcaaaatagccgcgggcctgttcgaatgtgatgaaggaggtcagaaggcggtccatttccagcttggcttcatgggccagggcttccaccctgatacgctgttcggaatgccccgtttcttccgcctgcaccagcagaacatgggtgagccatccgagcgtgccgatgaccagcagcaggctgattgccagcagaatgatgcgtatgcgccggttcacggatcaggaaacgaaggatgaattccagcggtagccctggcttctaagcgtctccaggggggaggcggaggcggccccgagcttgtcccggagacgcatgacggtcatttccacggagcgcgtatccgtcaggcgcgggtccacgtcccatacgcgccggagcagttcgtccctcgtgataacgcggttggggtgggtggccatataggtgaggaattcagattcccgcgcggtcagggaggtttccctcccgtctttaaaggtgatcaggcggttggcgctgtccagggtggcgccggggatcctgatttcccggagctggcgcggccgttccggagacctgcgcagaacggcctcgatgcgggcgagcagttcccggatgctgaacggcttgacaatatagtcgtccgcccccagcttgagcccctgcacgcggtcttcctcctctccacgggccgtgagcatgatgacaggcgttccggggcgttcctcagacatgacctgcagcacctggaatccgtccgcgcccggcatggccacatccagcagggcgaggtcgaaattgcgttcccgcacggcatggatggcggccaggccttcttccagagccagcacttcgtagccggatgcggtcagaacgtccgtcagggcatgcctgatgctgtcgtcgtcctccgcaatcagaatggtataggctgaatcactcatcgtttgattctataaaaccacaatatttcccctgttgtatagagaaacctgcgccctttcagtaacaatgccataacaggccgtcttcccgggggggcctcagtgatgccggagttcccggaaggggggaggaaggctgccggagggaatttcaatggcctccatgggaccggggacaattccttcaaagaacggcgtacctttgtaggaaaggatgattttggaatgcaccatgccgcccgtagtctggcgcaagaaatccgcatcccggaagaccaggagcgtctttccgttttccccgggtacaggacggcactggaagtcgccaagcggtgttccgtcagccgccgtcatctggacgggcagtatataggcttccgaaaaagaaggagcgtaaacaccccagaaggaagtgagcgccataacgacgacgatcacgatgccgacaatgattttcgtggaggtggacatgcggagggcggtgttctgacccgtacgtccacctccggtacggtggccgtgcggcgtcagcgttgttgaagccattcggcggcctggggggcgtaatacgtaaggatcatatcggccccggcgcgccggatggatattagagtctccagaactgtttcccgttcatccagccagccagaagctgcggcggacttgatcatcaggtactccccgctgacatggtaggcggctatgggaagagtcacctgcttccgcatggcggccataacgtccagatacaatgtggcgggtttcaccatcaggatgtccgctccctcagcttcatccagctgcgcttccctaagggcttcccggatgttgccgggatccatctggtaggtttttttatccccttccttgggcgcgctctccagagctccgcggaacggcccgtacagagcgctggcgtacttggcggtataggccatgatggagacgtcgtccagggtttcggaatccagggtggcgcggatggcggccacgcggccgtccatcatgtcgctgggggagacgatatccgccccggcatccgcgtggcacaacgcctggcggcagagaacctccacggaatcgtcgttaaggatttccatcgttccgtcggagcggaattccaccaggccgtcatggccgtcggaattgtagggatccagggctacgtccgtcatgacggtgatgcccggcacttcgcttttgagcgcgtaaatggtgcgcgggatgaggccgtcagggttgcaggcttcgcaggcgtccggcgtttttttctcatccggaatggctggaaaaagatccagcgtccggatgcccagatccatcaggcgcttagcttcctccaccagtcccttgacgctccagcgcgtgcagcccggcagggaggggatgggctggttcccggtcccttcatggacgaagacgggatagatgaggtgttccggggaaagggaggtttcccggataagaccccggatgttggcggattttctgttgcggcgaggccgtatcggtagattcatcatggtgtggtaatgaaaaggtttttaggaaggcatggcgttccgggacggatatgatcagggagccttgggggcctccagttccagcggctgttccgcatcggccccggcgagcatccagccgccgtccgtttggatgaagtgcaggttgttgacggagaattcatttccaactgctgtacgcacgccgatggtggccttgatttcggcgcagccgtctctggcggcgggaatatacgccgctttgacttcgggaacgtctttttcccttaccccggtgtgcggggtgggaatcctccccatgactgttttcaattgggagagcgcgtcttcaaattccttcacggaggcgaagttggacggggccagcatgcgcatcatggccaggctgtcccggttcgccagggcgcggccggcggcggttacggcttcttccggcgtgggaaaggacagcggaggatacgtccggtggaaatccgctatgatgcgggcggtggtggattcgtccggtttcagattccaggaagcgaaagcgtccgtcaggttcatcttgaagacgggaaggccgtctgtgggatccttggttttttccagcgcatagcggtaaatgagagcgggtttgtctatgtccggcatgctcatgcgcggcggcaggatggtcatggctccgatgctgtggatgtccttgccgttcttcttcgcgttgtttttattggcttcctcctgctggtcttcttcacggctgttcggggccatctggtcgtccggatgggggctcaggggaaccaggatggtattcggaaaggtcatgaagctgaggtgggtaggctggatatagcggttttcctcccttctgtcctggaggcgcatggccttgaccacgggaatgaggcgtgcgctctgggtaatggcggattccgtataatacggggaaacgagcagggcggcgatgagggccgggtcatcccccttcacggcccggatgagcaggttcttgagttcgtcgtccgttgttcccctgacgttttcctggcggaaacgcttgatatgttccagggcggctttaacggcggctacggagtactggtgggcgaggccgaaaattttcttcttggcctccgaggatatttttttcgctttctcacggatgccgtcgtcaaagggaagaaatgtgttgtcaaagcttccgggagtcagggaggccttccattggccttctttcttcaccagggccacggcggtggccgcataaacgtacgggttggccttgtccggcagcaggatgtaggccatcgccaggtcgccttcggcaatgatggagtcttcatccacaaagggcggacgttccggggccgctccggtgacatacccctggaccgcctccatgcgggaaaggatgcttttcagcctgagttggcttacaaagggggaagtggcgggcaatgacttgtacggctcgtgtttccagtccgttttttcctgaagggcgcggagcagcagtttggccgcgttcaacggcgtgctctggtccggaacgggtcccgtggacggagccttgtttcccgcagcctgatccatattgatccggaaacggacaggagcgccctctggcggctggccgccccgggaaaacccgcagcagaggcagaggcagaaaagggagagggggaggatgttcatgaccgctggccgccactatggcataaacggctgcgggtgtaaatcattcgttgggaatgttgacgcggccgttgccgcagggcagacaaccctggactccggggaaaagcgaacaaaaaggggggaaaggatgcgttccggaagaagaatccgaaagccggaggaaagggctttcccgcggcgttcatgccttgaattttcgggaagaaggtctttttgcatttgccaacagcgtttaagagaggtttactgatgcgcgtatgtccgaacacaaggaaagaaagactcttgaagaacgccaacagatgtctgatctggaacggctgcgccactcctgcgcgcacgttctggctacggccatttgccgcctctggccggatgcccagctggccggcgggcctgccgtggataacggtttttattacgacgtggagctggaccaccgcatcagcacagaggattttgaacgcattgaggaggagatgaaaaaagtggtgaaggaaaaccaggttttccagaaggaagtcatttcccgcgcggatgccatgaagatggcggaatccggggagctgggtgccctgggcccccgcagtgagccttcccgcttcaagattgacctgctgaacgacatcccggaagacgaggagatttccctctaccgcaacggggattttacggacttgtgcgccggtccccacgtgggccgcacgggcaactgcaaggcattcaaaatcatgagcgtggcgagcgccttctacaagggggacaaaaaccgccccatgctccagcgcatttacggcacctgcttcccgaaccgcaccctgcttgacgaacacctggaacggctggaagaggcgcggcgccgcgaccaccgcaaactgggccgcgaactgggcctgttctgcattgacgaatccgtggggcaggggctcatcctctggaaacccaagggggctctcatccgccgttccctgcaggacttcatcacggaagagctggacaagctgggctactcccaggtgtacacgcccaatatcggcaagctggatctgtatcgcacgtccggacacttcccgtattaccaggaaagccagtacgcgcccatcccggaacgggacgccatggaaaaactcagccaggagggggcttcctgcgcggaactgttcaacggcctggccaccggcaccattgagggctatatgctcaagccgatgaactgcccccaccacatcaagatttacgcgaatgacgcccactcctaccgggaccttcccgtgcggctggcggaattcggcacggtgtaccgctgggaacagagcggagagctgggcggcatgacgcgcgtacgcggtttcacgcaggatgacgcccatatcttctgcacgccggatcagcttgccggggaaatccgccagtgcctgggcatcgtgaaaactattttcggcacgctgggcatgacggactaccgcgtgcgcctttccatgcgtgacccggaaagcgacaaatacgtgggttctccggaaaactgggacaaagcggaacaggccctgcgggaagctgcggaatggctgggggcggactacagcgaggaagctggggaagccgccttctacggccccaagatcgacttcatcgtgcgcgacgccatcggccgcgaatggcagctgggcaccgtgcaggtggattacaacctgccggaacgctttgacctccattacaccggagcggacaacaaaccgcaccggcccgtgatggtgcaccgcgcccccttcggctccatggaacgctttacggggcttctgattgaacactttgaaggcaaattccccacctggctttccccggaacaggtgcgcgtgcttcccatctccgacaaggtgacggatgtggccgccgcgcatcgaaccgccctggccgccagaggcgtgcgcgtcacggtggatgaaacgccggacaaaataggcgccaaaatccgcaatgcccgtctggaccgcgttccctacatgctggtgctcggccagcgggaggcggaagacggcaccgtctccgtccgccaccgggacaagggggacctgggcgcgatgccctttgagcaattcgcggacctcgtagcccgggaaatcgcggagcgtcatatttctcccgtgatttgagttgccaagttattccttttagtttagtagtatccggacgtgccaaccaagccaacgaagaataatgacggaaatcgccgccgtgaccgcggcgatcagactcggatcaatgaacggattcgcgcgccccgcgtgcgggtagtgactgccaacggcgaccagctgggcgtcatgaacacgcgcgacgcgctggaaaaagccaaggctctgggtctggacctggtggaagtggccggcaatgccgatccgcccgtatgccgcgtggttgattacggcaagtacaaataccagcaggccaagctccagaaaaacaacaagagccgaaccgtcaagctcaaggaaatcaagctccgcatcggtacggataccaatgactataatgtgaaaatggcccgtacggaaagcttcctggaccatggccacaaggtccgcttccagctccgtttccgcggtcgtgagaacgcccaccaggagcttggctacgacgtcttcaacaaagtcatcgcggacatgaagaccatggcgcaggtggaccaggccccgcgcctggtcggcaacaccatgcacatggtgctctccccgctccccgcccagcagcgcgtgaagaaattcaccgcccacctggataaggattttgattccgaagattccgcctttgacgcggaggatgacgagtaagacggcattttttctttttcaggctttccacccttataaggtggaaagccttttttacgggcagatgattttccatggctcttttctataatgataccagggaattttccccggaggcgctggaggaattgtttctttcagttcaatgggaatccggaaaccatccggaacgcttggcgaaggcattgcgccgttacggggcagtgttctccgcttgggatgggagcagactggcggggctggtagccgccatggatgacggaaccatgacggcttatgtccattatctgctggtgcattctaggtatcagggatgcggtatcggttcgtggttgctgggtatgtgcaaaagacgctatgccgggtatttgcgcatagttctcacttcctgcagggaaaaggttcctttttacgaaaggaatggtttccttccggaccggacgcaggaggctgtgcgtttgattcctcctacgttcggagaaaccgggattgaacaggaagaaggagagtaatatctcaatttttctgggaaatccgcttgcggaagggctgcatgcggcacatggtggcggtgcgccagagccattccagggggccgtacaggaaatggcttagccagaggcggcaggcccaggcttggaggaggaagacggcaacagccgcgcacaggcatggccacggccccatgtcctgggccaggcccagcccccacccgaagaagaggaaggtgaagaccagcgtctgggtgacgtagcaggtcagcgtgcatttgccggcgctgctgagcagtctggcaggcaggggaaggccgggatgggtgaacagcaggacggcggcggagacgaaagccgcggtataggccaggttttcccattggtgcagaaggtgtcctgcgtccattcccagcgcggagtccagccgggaggggagtaacaggcgcgccgccagcagagctaggaacagggttccggagatttccagcatccgcaggaacaggcggcgtttgtcgggcgcgtcttcaaaggtgcgccatctgcccgccagcatgcccaggatgaagaggcccagcgtttgccagaggcggccgctgagcaggaagaaatgccatttgcccgcctgtccctgcgtcaggttccacagggccgcctgtccccagctgccgtgggcgtacaggaatccccgcgtggggcccgcagccggggagtccgtatggaaccagccggaggagtggggccaccagtccgccagcccggcatggttcagcaggtccatgagcatgaccggctggagcaggcacaggacacagagggtgatgagcaggggtgtcccgcatttgtagagcatgaccagggcaaagcccagaatgccgaaaagggtgaggatgtccccgtcatagaacagggtatgcgccagccccagcaggaacaggagcgtcaggcgccacatgaagcgtttccggaagtcgattccctgctgctcccgcctgtccagctggatgaagaagctgaggccaaacaggaaggagaagagcaggaaggatttgctgacaaagagatgttcatagacccagtccgccgcactgttggccgcagcctgccattcttccgccgggggcatgggaagatagaggttgaagtggtcgtgcgtgtggacgatgacgatgcccagcagggccagggcccggaggatatccagaatggtgatgcgcgcggccgggggcggcgttccggcgggagtccaggcggtcatggcgtcagcaggggcgggaaaaggatgggagcagctccgccgcgcgcctcctggcccattggtccgcttccagaatgggggccagttccccgcggggatccgccggggtgtggtcgtccatgacggcctccaccagtttccagatgccggggaaagagatttggccgtggatgaaggcattcaccgccgcttcattggcggcgttgtaaacggctgccagggtgctgttgctagctccggccctgcgcgccaggtccagggcggggaagacgtccgtgcggggagcctcgaacaccagcctaccgatttccgagaaattgagctgtttcagggagttgggaacgcggtccggccacgtgacggcgtactggatgggaaagcacatgtccgagctgctcatctgggccagcaccgtgccgtcccggtattccaccatggagtgcacgatgctctgcgggtggacgatgacgtccactttttccatggggacgtcaaagagccagcgggcctcaatcatttccagccctttattgaacagggtggcggagtctatggtgattttgcggcccatgctccaggtggggtgcttgagggcctgttccagcgtgacgtgttccagatcttccctgttccaggtgcggaaggggccgccggatgccgtcagaatcaggcgggagatggcttccgggccgccgtggctgccgttcaggcattggaaaatggcgttgtgctcgctgtccaccggaagcacctgcacaccggcccggcgggctttttccatgacgatttgcccggccatgaccaggatttccttgctggcgatggcgaggtccttgcctgcttcaatggcggccagagcgggtttgagcccggcggttcccacgatggagattaataccatgtccgcctccgggagctgcgccaggcggcacagcccctcttctcccgtttccacctgcgcgccggggagggaggccgctagaccggcagctccggacgggtcataaatgcatacgttgcggacgttgaattcgcgtgcctggcgggccagcgcctccacgctggttcctgcggccagccccacgatttccattctgtccggaatgtcccgggcgactttcagggcgctggttccgatggaacctgtggaccccaggatgacaacgcgtcgtttctgcataacggagaagcatgatgcaaaaaatacggcctcttgacaagccgggggatgaaaatcttccccgtgccgcgtgggccgttttttccgtcagtccggcttcattccggtgggccgggagggcggccgtcacgcattcgtgccgcaggcggcaggcgccgtggggtgatacgttcctgctggcttgtcaggcagggactcccggaaaaggacgggtttggacgtgaaggaaagttccgccgcatggaaaagggttgtattttcctccggagggcgtataggatggcacgaatgaagcgtatcgccgtgtatgccggtagtttcgaccctctgaccaacggtcacttatggatgatcaggcagggggcgaggatgtttgatgaactgattgtggccatgggcgataatccggacaagcgttatacgttttcccatgaggagcgcatggatatgctgcgggtggcgctttccgacatgccggatgtgcgcattgccgagttccacaaccgctttctggtggattttgccaatgaacacggggccacgttcatgctgcgcggcatccgttccacgcaggattacgagtatgaacgcgtgatgcgccatatcaatgcggatatggcccccaaggtctgtacggtgttcctgatgcctccccgggatacggcggagttgtcctccagcatggtgaaagggttgattgggccggaaggctgggagagccaggtgagccgctatgtcccccacaatgtattcgccatgttgaaggagaagtaccgtgaggtttttccgcgttcctagcggagattccggattcccgttccgttattcgctgtccggtggagagggggcaggggcagaacgcctgcgcctcctcctgtctttctgctttctcatgcgctggatgacgcgggctcttgcggcgcatcggcccgtttgcatttgttccacagcatcgcacagttccctgcgcgccagaaagcggttgagttccctggatctgtccgcatggcatttgacggcgatgcccgtgggcgtgtgcctgaggtaaacgcagttgttggttttatttactttctggccgcctcgcccgcttccgcggacaaagctttcctccagatcctgttcacggatgcccagggcctccatccgttcccggagagctgccagtttttcaggcctgaccatagccggaggattgcagggtgttaacgcgctgccggacagcatgggccagcatgtcccggctggcggccgtcatggggcggaggctgacggcaacggttgagccgtcagccaggcggaggttcagccgtccgccttcccggtccgcggagcgaatctgctgccagaagaaccattgcatggtgcgctgcgttctcaggaacggcaggatttccactcctaccggggtgacgatgacggccgcgtgtttcaggcagcggctccccgcagccaggcagagggcggcgggaacaagcgccgcggcctgcatagcccacaggggggcgggcaaatacggggtaattgtatcatatcccgtgagctggaggaaagcggcggtggctgccagaaggaaccccgccgccgtcaggatggcgcctgaccggttccgggtgaagcgcaactcccgtttccggacgggaatgtgccggatgtcctccacgcccagaccggcctgaaccggacggggcgcggaagcgggaagatggcgttcaggctccggcatagacgcccgggaggatttccttcgtttcgtcggagtcgttttccatcagcaaggtgccccggagaacggctccgtcctggaagtggaagcggccgcgcagggtcagcttgtccatgcctatcagggagggcaggcccagcccgtccagggaatccaccagcttgtacagtttggaatccaggtccaccaccggggtgttgccctgccgttccggcgccagggccacgttgccgtgttcatccacggcgatggcgtccgaacggagcaggaacaggtcggaagtggttttgacggggaagaaacgggaacgcgggacgttgacggccctggcgccggggaagcattcgatgcccgcgcccatggccgtttccagctggtacaccggggcggattccggatcgcgggggttgagcgtctttttattacggatcatgggcagcgggagtacgccgccgttggcgtccagaatttccttgagggcgtccaggcgtatccagagcgtattggtgttgaaatagcggtgcctggaaatgttctggaattcaggaatgtcctcatccgggcactgggccacttcccgcagaatcaactggccgtccgatttcctgacagccaggtggccgcctttcctgtccgcctccgtgcggcgggtgacttccatgacgaagggggcgccgctttccgcaaaccagcggaggaagttcatgtcaagctgggcgcccagattgtcggaattggagacaaaagcgtatttaacgccatcctccagcaggcggtccagccagccggaccccagcagggccggatacaggtccccatggccgggcgggcaccattccagctccggctgttccgggcagctggccggggagaggccgtccgccaggattttgggaacgcggttttgcagcagctccacttcggcgcggtccgcaaagccgtccgccgcgtatttttccaggtaggccagcgtgtccgcgctggtggagaaagagttcatcagcagaaggcgcacaggcgtgccggagatggagcgcagatgcttcacctgcctgacgatcaaatccaggaacgtatcctctccttttactttcagcaggcttttcgctttctggaggcccatgctcgtgccgaggccgccgttgagcttgatgcatacgcaacgggaaatcaggtccttgtccgccgtgggggtggaggccgtgatgtcctgccagtcttccacctggtcggcgggcaggatgtccgtttccggaatcatgccggagtggttggaaacaagggcttcataacaacgggagaaagcgttgacggccgcggctgaaacgccggcggactccatcttttccgcaaaaggagtgaacgtactcattggcggcttttgtacaaaatgcccagaggaggctcaagcattatcagcgtatccggaatgcccgcgcgttttctctttcttgcagggactgctccgggttatctggctgccgtcacccggatccgccggtagtccgccacccattgggaaccgtcccataactcatctttcagggaatcctccatttccttgaaaatctggatgcactgttcttcgcggaggttgttcaagtcttcccggaagaattgacacgcccagttgcgcaggccgtcaggaccgcctttcagcggcgtagggcggtcaaattcctccattgtttccgggcggagcccggcttgttccagaacgctgccgtattcttccgcggcgggaaagtaaaaacgcgttgtgtacgggaggttcctgcgttccagggctgtccggaaagcttccctgatgcggagaatattgaggcgggctccgaattcgcagaccagtttcccctgcggtttcaggacgcgggaaacggcatttaagagagtcccatgatccggtatccaatggaaggccgcattggagaaaacgatgtcaaacctgttgcgccagggcatgaggcgggcgtccagcacgcggaagtccatgccgggatagagctggcgggcttttgctatcatttccggagaggagtccaggccggtgacggacgccgatttctccagcagagcgtgcgtcagcgtaccggttccgcagcccaggtccagaatggactggtctggattttccggtacgcaggagagcagttccctgccgtattccgcgacaaaaccgtgtttgttttcgtaccattcagcgttccagtccattacctctccatcgtagggaaaaagggttttttttcaagaaagaccctgtctttttttcatggtatttttcccggagggcctctgtccatttctccgcgccgtgccgggattcttcttgcgttggcgggcgggaaatggttaagataagcttactatgaaagcaacagccctgttcctggcggcttccgccctggccgcggtttccgccgtcgcctatgacggatacggttatgacccccggcccgcgagttcctataacaataccatcagcggagcggcccatatcggctatgattcccggtatgcctataaagacgtggtggcttcctccctgctgaaccgcagcggcgtgtttaacatcggcggcgagctgaacctcaacctggccagagactggaagcaggaaatcggcgcggaatacatggctttctgcgacgggctgctgagcgacaaggacgcctttgacgccagctggaaggctgtcaaagagctgttccccaatctttccttccggggcgggtatgagttgaattacggcggcctcccggggtatttgagcaagcgcatggggaaggctccccattccctcgcccagtccgtcacggcggggctggcgtatgacgatccgggccacggctattttggctccctggatgtgcagtacggcttttacggcatgaccggctggcgcattgacctgaacgcgggcaagcgctggagcggcctgattcatgaaaaggtggatctggagctgagcgccggaacaggttattcttccagttactgggggcccggcgtagccgggtttgaccaggttaacatcaagctggcggctcccgtgcgcgtaacgggtgtggactccagccgcgggttccggattattcctttcatccaacttgactgggcgggaaacacccgttccgaaatccgccgctacgccagcatgaacgcgattgaggatttccgcatccgtgtgggcgtggaagccgtttaccgtttttaagcggctgctccgcggcccttttaccgggaagggccgcggaagcgttccccctttccgggggcgcatgccccctccccggcttcccttgaatcccctgccatgttgaaaatgatttttctgctggcccggcgcatgtttatacggctgctgctggtgctgcttccgctgggcctgtttatgttcctggcgcaggccattcccctttcccctctgcaatccctgctgttgctggttccggtgattgcctttgaagtgtggctcgtcatcaggcatctgctgcccgtcatgggggagctggtgaccaagacgctgtattcctccaatattactacggatgaggaagtgctggtggaggcttccaggcgcatgctgaattccggggatccccagggcgctctggaattgctggaacgctaccggaaggagaatccggggctggtgcgttcctggctcatggaatccagcctgctgaacgatatgcgccggtacgcggattccgtcaacgtccttcagaaaggattggaatacggagggtggcgcaaggaggaccgggctctgttcctgtacaagataggagccatttacgagtcccagctcaataacccggacagggcccggaagtattgggaggaagctgcggataaatatcccgatacggcctatggtcgctccgcacgggacaaggttatgttttaatgcggctttccgtgaagggatggcatccggaattttttcattgctttaaagaaccgcgcgtgacggaggaataagtctttttctttttccttatttgcgcagggaaatattcttcaggggggcgcgatgccatggtggttctttctgctgagcacggggtaattaagcattgtatagatcaatgtatgtgctacgattcttccgcatttaataataatgctttgccgtttccttggaaccggattaatttttcaactaacaggatatgagtaaaataagccatataaaatatatggtgctttgcaatcttccctatcgtttgcgggagatcgccggacggattgcgaagaaatgcaggagaaggaaagaccggtctcttgaagcgaagctggaggatattcgcaatttgcttatttataaccaccctatttcctcagttcccccggcgacggggaagttgaggctccttcaggacggcaatacggttttgctggccctttttgcgcgcaaatgccgggaaaaaggactgcggtactggctggattacggcacgctgctgggggcggtaagacacaggggctttattccgtgggatgatgatctggatgtgagcatgatgaggccggagttcgaccgcctgctggaactgcttcccgttcttttcccccgtgaggaaggatttacctggaacaggcacgcctttctgcaaataggatatgagggcacccccctcaaccttgatgtgtatccctatcatttttatgcagagagtctttcatctccggaacagcatgggaagctggacaggcttttgagcggatttaagaaagacgtggtgctggtaggttccaggatgaacctgaccgatgggcaggttcaggagaagatccgccaggatattctggaaggaagggatgctgccggggaagatgaagcccccgggatttttctttctcctgccattacgtttacaaaaaacacgcacctttcctatgaaacgttctttccccttggctccgcagaatttgaggggatgatattttccgttcccaaccatgcccgccagtacctgcaatttttttacggcgactatctgtcttatccggaacgcatccagttcaagcatccttccgtgaaggccatggtggagaaggttccctttgaggcggcggtcaaccgtttcattgacgtttacggaaagcggattgatgtgcccatgccatgaaaacggttattacttacggaacctttgatttgctgcacacggggcacgtgaatctgctgaagagagcccggaaactgggggaccggctcatcgtcggcgtgactacggacagttacgaccagagccgcggcaagctgaatgtcatggagagcctggaggaacgcatggaaaatgtgcggaaaaccggtctggcggatctcattattaaggaagaactggaagggcagaagattcatgacatacggaagtacggggcggatgtttttgtgattggctccgactggtcggggaaatttgactatcttcgcgattattgtgaggtggtttacctggaacgcaccaagggcgtttcttcaacagacctccgttccgcccggaatcccattgtatatatgggaattgcaggtcacggacgtatagcgggccgttttctccgggagtccaaatatgtcagcaatattgaaataacagccgttttcggaaggaatgaggagaaagtccgccgttttgcagagtcccacgctctgctggaatattatacggaatacgaacagtttctggaccgggttcatgccgtttatattgccgtcccccatcatctccattatgaaatggccaggaaggccctgttgcgggggaagcatgtattgtgcgagaagcctcttgcccttgcccgggaggaggcggaagagctgttccggctggccgaggagaagggagttgttttgctggaagcccttaaaactgcgttttgtccggctttccagcaattgaccagtttggcggggagcggcattattggttccatcaaggcggtggacgccacgtttaccaagctgataaaggatgaggctgccagggagtatgaccccatgcaggccggaggtgcctggacggaactgggttcctatcccgcctttgtcatcgggaagcttctgggaaccgagccccgcaggatttgttttgtgacctgcagaaagcctcatacgggtgtggacgtgttcactcgcgcggaatttctttattccaatgcagtagccaccgccacggcagccataggagccaagcaggaaggggatctgtgcattaccggaacggaggggtatatttatgtgccggcgccgtggtggaagacggagatgtttgaagtacggtttgaggatactcggctcaacagaaaatattttgccaattttgaaggggatgggctgcgttatgaacttggcgcatttttgcgcctgattcatggctgccagcacggcaaccgtcttttgacccgtgaggattccatgttcatggctgatattgcctcccgtttcaggcgtgggtcatatgttgatgaaatcagctgatcagggtaggcatgccgtctgccggaaatgaaaggagggagatttttctttctgctcatcaacattgatcaggcggtcataaatgtgcctggcgaagacgatatcgtggaggcccagcccgatattataactgagaatgcgttcttccggagacgttcttcccgctgtttttccggccagcaccggagctatttccccaaattgacgaaagcgctcaaaatgccggaaattcttaacatggtcacgatcatcggcaaataccttgtcgaaaaacaaatcacaattttggaatccctttgtatgtacggggataacagtaatgcctggtttaaaacagctgtcgtcggcaaggatgccctccgcattagtaatgcaggaaatgacggcatctgttccatcaatgaggctgttgatgttttgcgcttcttcaaaacggacgttgctatggcattggaattcttcaatgaattggggaacatgcgttttgtaggaaagaagacgcaccgtgaagtttttttcaggatataacgccagaatgcatgccatggtggcgcgggccgtatttcccagccccatcagggaaattgtctggaaatcctgtctggcgaatgtttgaagggcgagggcggctactgctccggtacgggcgtttgtgacccaaaaggcgtccataagagccagaagctttccggtgtgataatcgtaaaggagtatttccccattaatggttttggtccgttccggataacgcgttacaatttttacccccatggcgttcaggccggggacgatgcagggcatcgtattcatgaatttcccttcttcaaaggcgatgcttgttttatggggaaggaagacaggttcttcgtccttgatgcggaaggattcttttacccattggagtgcctgccggggagaaatattgagggaggaaatgatttcgtgaggaattgtcagcatggtagggggggaaggtaaaaacggcgtttgggaaaagggtggtaatgactagtttgaatgcatggaacaaatctcgtgcatggcccggaccagggcatcattgtcggttgcgtctctgacggcgatacggatgaattctctgccttcaaatccttttttccggctgcagtccttaacaaggatggagtggtttttcagcagaaggccggtcagggagcgggctttcatggggggcttgacctcgcacatgaaatagtttgcctgggaggggaaaacgttcaggaaaggcacgcgggagagttcctgcatgaagcggtcccgttccttcatgaaacggttgcacgcgcgcacgtaggattgctcgtatttcccgaagatttgcatgtagaattccgcgatggaattgatgttccagatggaaacatctttttttatccatgccgccagttccctgtctgcggaggccagaatacccaggcggaggcccggaacgccgtaggatttggagatgctttttaccacggccaggtggggatattcttccaggatgccgtctttcagcagcgtattgtccggcattccgcaggagaagtctacaaaggattcatccacgatcaggcggatgccgcgggtttttgtccacaggcagaggcgcagcacatcgcctttcggcaggaagaagccggaagggtttcccggattgacgaggagcagggtaccgatgtctttcccggaaaagaattccatcaggtcgtccgccgtataagtgaaattccgggaagcggtatggaagggaaccaccatatccgacttcacccggttggggtattcttcaaaggtagggtagatgacccccattttcccttccaggcgggacatgagcgccttaatgagttccgccgcgccgttgccgatgcagatgtattcctggctgatgccgaagtattttgccgccagcaggctgttgaccctcattccggacgggtattccctcaccaggcgttcaaaattcgccttgagttcggacatgaggcgtttgttggggaaatagggattgaccaggtaacagaaatccctaatgcggggatagcgccagtagcctccgtaccgggattccatcaggcgcaggtgttcttccctgtccggggtgaatatggaggctgcgatgtccaggtcctggatgtcgtctatttcataccatgcttcgccgccgaggcgcagcgccttgatttccggcttgtccagcagggcgatgacccgcagcacctgttcgtaatattcattattgcccagggctttgctgtaggctgtaagaaaggggacgtaatgggtccgggagaattccctgctgaatttgtaaatattgactgttttaaaatattccgtctttttcttgtaggagaatttgctgccgggaatgaattgcctgatgttgtcgtcttcatccagagtgacgaccgttccgtccatccagctttcaaatttggcgacgagagcaaggctggggtagggatggcggagcagggcatcaataacggagtcttcaaaaatcaggtcggattcaaaaagcagcgtatcgtcctgaagcaggtgttccttggccaggtacagggaataaatattgttggtgctggcgtacaaggggttgtccacatattccacaggggtggaaatgtccagccgggaaacgaaggttttgagtttttccccctcataacccgtaacaatcacgattttttccagagacggggaaaggcggtccaattgtctcatcatgcgttctatcagcgtcactccgttgacctggatcatgcacttggtattgttccgggtgagcgctcccagtctttttcccattccggccgctaaaatgatcgcctgcataagtattctaatttgtcttcagaacctgagaaagaaccgggaactatgtttaacggattgagcatccgttaagcgtttctcccattctgtccaaagttaaatcaatgaaaaataaaaggattgcgatgaaacataaaaggcggttttttcttttcgccctggtaatatcccattaacatattcttacagaaatttttactttgacggcggatgctcaatccgcttgttgccaataccgtggaaagggaaggatgaggtctgtctgcattttggaaaaagcagcgttaatatcatggaacgggtgttttctccgaaaaggacaacttgtttttcattgacttgtaaaaagtgggggataaggttttgattctgccggatgtgctttcctggaaaaatgaaacatatcctgcgtgtttttgacccaatttatctgcgatgaagctgccatcattcattaccgccggaaggactggaaaattagtaaggggaaagcattggtgggtgacggaagtccggtgctgcggcctgaaagtgctttcttcctgcacggataggaaaaagcgtttcatccgtttctttggtattccatgcggacggttcaaggtgggccgggaaggtgaatcctcccaattgggcaaactggtaaaagctaccgttcgggccgaggagatgccccaggcgtccggagtgctgaggattgtgcagcaggccatgacctgttttttgaatgaagtggccggaagtcttgaggagggcggttatcagtactggctggatttcgggacgctgctgggcgcggtgcggcaccggggctttatcccctgggatgacgacctggatatttccatgctgcgtgaagattatgaaaggttgagggcgaacgccgccgggcttttcggttcgcgcggtttctccgtcagtatggatccgttcatccagataggtttgccgggcacgttgtgcaatgtggacattttcccgtatgacacggcccctgccgcgtggtctccggatgcgcctgaggaaagggagtggctgctgcgcggttacaaggcatccggaatgcttgattatgaggcagattcctcctgccgctaccggacgcggtgttcctatgaggaaaaaatggcgatccgggaccgggtggtgatgggaggacggcggcaagcggatggaggaaacattttcctgggatttgagattccttttgccggcccgtgccgccattccttccgccatgaatggctgtttccgctttcccgcgtccggtttgagggaagggatttcccggcccccaggattcctgaaatggtgttgtacggccagtacggggactggggagtgctgccggattctccccctgtgcattttgatttgaaccacatttccaaggaggttctggccaggatgatgtacatgcgtgatacggggcgccttcccgggcgcgattaaagggccgcacccttttcttcccccgcagggagaagcccttctttcttccttgaccctgctgattgaggaggggtatcatcagataatgagaagacccccgatacccggcttggtgatggcggacggatggctccagccgtattcccgccagatacgcgaccgccagcgtctgtttgacctgaaaatgaagaggatcaatcagcgcgccggctctctggaggaatacgcgcgcggataccgctattacggtttcaacagagacgcggagacgggggcgtggacataccgggaatgggctcccgccgcccgcagggtgtccctgattggggattttaacggctggaaccgggagagccacccgctggagcggaatgagcgcggcgtgtgggaaattacgctgccgcctgatgcgctggcccacgggcagaaggtgaaggtgcacgtggtcggtgcggacggcacgggccgagatcgcattcccgcatggattaccaggaccgtccaggatccgaccacttatgattttgccggggagatctggatgccggaacacccctatgaatggcggaataacggttttgatccctcccgggtggaagttccgttcgtgtatgaagcgcatgtaggcatgggcggggaggaagggcgcgtgcatacgtaccgcgagtttgcggacgaggttctcccccggatcgccaggctgggttacaataccgtccagctgatggcgatccaggagcatccctattacggttccttcggctaccacgtttcttcctttttcgccccttcctcccgtttcggcgagccggaggacctgaagtacctgatagaccaggcgcacggcctgggcatcgccgtgctgctggacgtggtgcattcccacgccgtgaagaacgaggcggaagggctgaacaattttgacggttccggaggcatgtatttcctgcccggggagcgcggccgccatccggactgggattcctgttgttttgattatggccgggacgaggtgattgaattcctcctgtccaatgtccgctggtggctggaagagttccgttttgacggtttccgttttgacggcgtgacatccatgctgtatttccaccgcgggcatgagccgttcggggatttgggcgcctacttcggctcttccgtggatctggatgccgtggcttatctgcagctggccgccacgctgattcagcgggtgaagccgggcgccatagcgattgctgaggacatgtccggcatgccgggattgtgccgcccggtggacgaaggggggattggtttttcccaccgtctggccatgggcattcccgattactggattaagctgctcaaggagaaaaaggatgaggaatggagcatgggcgatatgtggcacacgctgaccaacaggcgctacggcgagccgcatgtggcctattgcgagagccatgaccaggccctggtgggggacaagactctggcgttccgcctgatggatgcggaaatgtactggaaaatggccgtggaccagcagagcctcattattgaccgcggcatggcgctgcacaagatgatccgcctggtgacgctggctaccgggggggaaggctggctgaatttcatgggcaacgaattcgggcatccggaatggattgattttccgcgcgaaggcaacggctggtcttacgaatactgccgccgccagtggtccctggtggacaatccttccctcaggttcaagttcctgaatgcctttgaccaggcgatggtccgtctggcgcaggaagcccggctgctgaataatccgccgcctttcccgcttaatattgacgagaccaaccatgtcatggcattccaccgcggcggtctgttgtttgtgttcaactggtccggagacagggctatcatggattacatgctgcccgttccccagaagggggaatggcgggtagtgctggatacggacaacgcccgtttcggcggtttcgggaggcaggatgtttccatgccgcattttacggatggggacgggaacctttccctgtacctgctgccgcgtacggccctggtcctgaagagggtaggttccgccgtcatggcccgccacccggggcgggaggattagcgtgcaattccaaaaacgggcggtttatttatccgtttgtgaaagggagcgtagtgcggagctgcgtacggaacgcgggatggatatgcgcttttactcccggaaagtgtccggacggcaggctgttaccactgcgcgggaagttcccgcaaggggggcgctcctgagtccgcttttttcaggcggatggtcaggatgtctgttttaaagtctttggacttctcgttattgcggccccacaaaatggcaccttgcgtggtcatttccggataaaacgttttttccgtggaaaggaagcccggtttatccgccgcaacatgcacgggcttgtgcctgttcagggagagcgtgacgggggcctggctggcgtagtctccgttcacgcgcaggctggctccggaaggaatgctgcggatggtgatgtcccgggaagaactgctgcatgagaggcttgcgccgcagaatgcggagagcaggagaagatgcgggaaaaggccgtgagtcattgctctggaaaaaatcaatgatgttccgccattttcatggcggcctgcttgatctgggccgccatggagttgagggcgttcgccctggtgggcgccaggtggtccttcaggccggttttgtccagcttggacatgtccgccttcagaatttcttccggaggcaggccggaaagcagccggatgaagacggcaatgaggcccttggtgatgagggaatcgctgtctgcgtacagtttcagtacgccgttgtccggttccgtgtgcagccatacgcgggattggcatcccttgatgagggagtcctccgttttgtaggcttcatccagtctgggcaattttttacccaggctgatgatgtattcgtagcgttccgtccagtcctggaacaaatccagttcatccagcaggtcttgcaggcgttcttcgtagttcatggctcggagattgggtaggatggccgggcgggttatccccggcgggcgtctgcaagcgtggcgagcacggctttctgggcatgcaccctgttttccgcttcccggaagataacgggagcaaaatgttccagcacgtcttccgtgatttccttgccgcggtaggcgggcaggcagtggaaaacggagtggccggaggcggcatgttccagcagctccctgttcacctggtaggggtagaagtgtttttccttggacagtccttccgattcctggcccatggaaagccagacgtccgtgttgatgacggaagctcccttgacggcttccacggggtccgtggtgaagatgacgttctcgcagtccagatgcctgcggaagtcttccaggggaaggtaattggtaggggctccgatggcgagcgtaaagcccagcctcttggccgcccacatccaggagcgggacatgttgttgtccccgtcccccacgaaggcgattttcatatccttccaggaaccggggccgtagatttcctcaatggtaagcagatccgccaggatctggcaggggtgttcctcgtccgtcagagcattgatggtgggaatgccggaaaagctggcgaattcctccacctcctgctgtccgtaagtccggatggcggcgccgtggatcatacgtcccagcacgcgggccgtatccttgatgggctctccacgcccgagctggatgtcatggacggaaaggaacatgggacggccccccagttcactgatgcccacttcaaaggaaacgcgggtgcgggtagaggatttggaaaagatgagcgcccaggtctgccccttcaggggaaggcgttcgtgatggccgcgttccgccttaagccggtggcccagggcgagcaggtcccggatttcgtctccggtaagctgttcgatggaaaggaggttgttcatggtttttgaaagggaataaaaacgggaaagccgcaccatactccctgttttcttaaaagaaaagggaataatgcggctttccggggagggatggatatgcctttacttacagcctggccgccgcctggtccggccacggtacgggagcgccttcacggactccggcgggattattcttcttgtaggtgggcatttgggccttgcgctccttgagcagggcggtcatggtcctggccatggccttaacgcgttccggctgctgttccgccaggttgtgctcttcgctgatgtcctccttgaggttgaagagttcgaacttctggtcagggtgccagtagataagcttccagtccccctggcgcatggccgtgctgggggaataaagggagttgtttccgttcccttccccccatacgttgggcgtgtggaagagcagggggcggttgggattcatgctgccgcctttcagcagggcaacaaagcttttgccgtccacaacctgaggcgcctgaattttttttgctcccgctatttccagaatggtggggaaaaagtcttcaatgatgacgggagtggtgcagacgctttccgccttcgtgaccccgggccagtagacgatcatcggttcccggatgccgccttcccggttggaacccttgccgaaactaagcgggtaattggattccttgttgcccatgcgcccgctgatggcaaggcccccgttgtccgccatgaagatgatgacggtatttttatccagattgttttttttcaggtattcccggatgtcgcccaggctcttgtccatcccctggatcagggcggaatagcgtttttcgttgtcggaccatttgtggccgtcattggggttggtgtactcttccgcaaacctcttgtcataaccgcgcatgtcgaagggggcatggatggcgtagtgggacatgtacaggtagaaaggcttgtccgcctccctggggtttttccggatggcatccaggcgtttcagcgcctcctgcgtcagggcttccgtcaggaatgtgtcgtttttatagtaattattttcatccagtccgcggacatggaaattccccgtgccgtatttccgggaaccccggtagtccgccgggccgcctatttccgtgctagcgatattgtagtcaaagccgaagagcctgggattggctccgggcgtatttttggagccgaaatgggcttttccgcagtggatggtggtataaccctgttttttgagcagggcgggcagcccaagcacctgggtgaagggtttttccatcctgtactggattttttcttccgtcaggggaagatgggtggttccggatgccctggtccctgccggctggatgccgttgacgctccagtctgcgggagccttgagcgcttgatggcctgcgtccgtggtttggtcacgcaggagcgtccagttcgtgacgcggtggcgggcggagttcatgccggacatgaggctgcaccggctgggggaacagataggctgcgcgtaagcgttcgtgaagaccatgccctgcttgcccagagcctccatgttgggcgtgcggtagcgcttgttcaggaaagtaggtttgggagtgccgtcctcttccctccaaaagggcagggatgtatcctgccagcccatgtcgtccaccagaaagaggatgatgttggggcgtttcggttctgccgcgcgggatgcttttacggaagctgcggaagcggagcaggcgcttcccagcaggaacgggatgagaaaggctgcaatacgggaaatgttcattactaagaaaaccagtacttataataacgcatgagacggacgtttctgtcaaggattcgtattcccgcggcagtttgttcggaaacgccccgtgtttccggtgcggcgtgtaccgggatgaaagagccttattcaaacagggccggataggatttccgggccagggccgtgctcaagtccacgatagacctgctgttgggggcctggagcgccttttgcgccatgtcccggcactggccgtagtccagattgcggatggcataccggatgatggggacaaggtggacccccacggacatggaggtggcccccaggccgatcagcaggggaagcagggtgatgtcccccgccatttccccacagatggccgtgggaatgttttcccgttctccggcggtgatcgtcatgtccatgatgcgtatcacggcaggatgcgtggggcggaacatattggcgacgcggttgttgacccggtccacggcaatagtgtactgggtgaggtcattcgtgcctatggagaagaaatccacctcgcgcgccagcacgtccgtcatgatggcggcgctgggcacttcaatcatgatgcccactttcaagtcccgcgcataggggatgttcttcctttccagttcttcccggcattcctggaggatgtgcttggctgtgaccacttccgtatagccggagaccatggggaacatgatgccgcagccgggcgtgtccgcgcaggcacggagaatggcccggagctgctgtttgaacagctccgggcggctgagggagacgcggatgccccgccagccaaggaaggggttcggttccggagtgcggagctgttcgcacggcagcttgtcgccgcctgagtccagggtgcggaagatgacgccgtggggggaacagccttccgccagttttctgtagtagcgcgtctgttcttcttcgtccggcattccggatgggttgcccagcagaaagaattccgtgcggaacaggcctaccccttccgctcccacctccttgatgccggaatattcatgggggaactccacgttgacggacaggcggatgttgcgtccgtccctggtgatggtgggcaggccgcgcagcgcttccagcgccttgtaggccttttccttttccacctggaggcggtggtagtattcctccgtttctttcgtgggtttcaggatgagcacgcccttgtagccgtccaggatggcgggggagtggctttccactctcagaagggcctggtcaagccccacgacggcggggatgcccatggagcgggcgagaatggctgtgtgggaaacggaggaacctatttccgtggcaaagccgtgaatcaggctggcatccatggcggccgtgtcggaaggggtcaggtcgtaggccaccagaacctggtctttttccgtttcttcctcgtcttcaggaggttccgtgctgcggaggttgttgatgacccgctgcatgacatcctccatgtccgccgttttggcgcgcaggtaggggtcgtccacacggcgcagaacttccatgtagttctgcatgaccacataaaagatgtgctccacattctggaggcgcttgagcagttccgtctgaacctgctggaggataattttatcctgaaggagaaggatgtgggcgtcgaagatggaggcatctttctctccggatatctggatcatgcgttcccgcaacgtcctgatctggtccgcagtagtttgcagcgcccggtggaagcgcaccagctcggcatccacttcttccggggaaatatcgtacgctacgggttccttggaaccgctgatctgaattttaatcttgcccagggcaatgccgggggaaacgggaatgccctgaagccaggtttcttccgttgaaatgggttcctgaatcatctgcgggcttaatggcccggtctcatatggccgtgagccggagtgttcaatcttcttcaaacttgcgggaaatcaggtcttccagcgcattcagcgcttcctgttcgtccttcccttccgccgtgatggtgatcttggagccgtggcctaccgccagcatcatcaaacccagaatgctcttgccgtcaacttcctcgccatccttctccacgacaatgtctgcatcaaatttgctggccagtttgacgaattgagcagccgggcgtgcgtgaatgccgagtttgttgatgatggtgagttccttggtgaccatggaatttgaagtaaggggtgataacggttgctacaacggtaagtacactaattaaagtttttttccaagagttttttgtcagtcctagttttcggaggattggaagtttgacatgaggcggcggttgaactccccggccatgtcgatgcccatgtccttgagatgatagtccatggcggctacttccaccagcctggcaatatccctgccgggagccacggaaagctgaacatggagcactttttcccccaggacgtccagcccctcccgctccaggccaagcctgtccagctcttcctggtccttggcgggaatgagggtgacgatgaggtccagacgcttgttgtggcggatggatttcaggccgaaaagggtggtgatgttgacgatgcccaggccgcgcacctccatgaagccgcggctcatttccggagcgctggccaccagttctccgcccacgttgcgcacgtacaccatgtcgtccgccacgagggccgcgccgcgttcaatcaggcccagggccgtttcactcttccccacgccgctcttgccgcggatgaggacgcccactccgcgcacgtccaccatgcagccgtgcagggtgacgctttccgcgaattcgttttccagaatgatggtggcggagttgacgaatttcatggtcaccaggctcgtgcggaaaacgcagactccggcttcatccgccagctccacgatttcccgggggggaattttgtcacgggagaagacgatgcccggcacctcgcaccggaacatgcgctgaatgcgagatttgcgcatgccttccggcagtttttgaagataggccagctccgcggagccgaaaacctggatacgtttgttggcaaagtaggagtagaagccggcgattgccagcccggggcggttgagggcgggttcgcagatgtggcggctgaggcaggcggggctgttgataagttccagttgaagggcttccttgtacttgccgtaaaatttggacagggtgacgaaatccactttcttcactttggatttgctgaacataatcctatataaagaaacaaaacacacgcgagagcaatcaaatattgttcccggcgccatgtgcgggctccattttttgaaaaaaggcccgttccggcatggaatgccacactttaccggttgatttgaagccccaggcatggtctgatgaaggcatgaacagactggatcaattagccaccttgttgagatttccaagcatttccgcacagaaggaacacgcccgggacgtgagtgattgcgcggactggctggtagacaaattgtccggcatgggattggaagcaaaggcctgtaaaacgcccctccatcccattgtgctggcccgcagcccgcgggaggaaggaaagcccaccgtgctgatttacggccattacgacgtgcagcccgtagatcctgtggaattatgggaatccgacccgtttgaaccggaagtgagggacgggaagatttacgcccgcggcgctacggacaacaaggggcagctgttcgcccatattctgggcgtggaggaattgctccgccagaacggagaccaccttcccgtaaatgtgattttccttctggaaggggaggaagaagtgggcagcggcagtctttcccagtttatcaaggagcacagggaagagctggcctgcgacgttattgtggtttccgataccggcatggccgctccggacacccctacgttttcctacgggctgcgcggcctggctggggcggaaattatcgtcaaaggcccttccgcggatcttcattccggcgtgttcggaggagcggtggccaatcccatcgccgctcttgcggaaataatcgcctccttccacgatgaagaggggcgtgtggccgtgagagggttttacgacggcgtggaacctatcgccacatgggaacgcagcatgtgggccacggtgcccggcatgagcaatgaggagctggctcagctgacgggcgtggaaaccgtggtgacggaggccggtttcaccggagcggaatgtatttttgcccgcccgacgctggaaatcaacggtatcggcggaggttaccagggtgagggaagcaagacgattatccccagccatgcctttgccaaaatttcatgccgcctggtgccgggacagcagcctgaaaggattgaaaccctgctggaagaacatgtaaagaaacattcccccaagggcgtcacggtggaattcaggaggggccatggcgggaatgcttacgtgtgcgatccgaattccgagttcggtcttgccgcccagcaggcgctggaagaggcttttggccacaaacccgtgctggtaagggaaggaggcagcatcccgatcattgaagagatgaagcgcgtgctgggagcagatgccctgatgctgggcatgtgccttccggatgcccgcatccattcccccaatgaaaactttcccgtggatttgttctccaagggaattgacatgagccagattcttctgcgccgcctggggcagatcaagcattgacctttttatggaccagcctgtagccgctgaaatagtcaacctgcacaagacctttaaaacaggtcttggcaaacccgtggtgcatgccgtgcgggggatagacatgaatatccggcaaggggaggtatatggcctcattggtccgaacggctccggcaagtccaccctgatgaaggccctgctggggctggtgaggcctacggaaggttcctgttccattttcggcaggtccagcctggctccggacagcaaggaggaagtgggctttcttccggaaaatccctatttttacaaatttctgacgggggcggaaactgtttccttttacggcaggctgtgcggcctgagcggaaaatccctgaaagagaaagtcagggaactgctggagctggtgggattggctgatgcggcggacaggcggctgggcggttattccaaggggatgctccagcgcatcggcatggcgcaggccctggttcagtccccccgcctgctggttctggacgaaccgaccgccggcgtggatcctctggggtcgagggatatccggaacattatcgaaaacctgaaagggcgggggatgaccgtattcctgtgttcccacctgctggaacaggtgcaggaggtttgcgaccgggtgggcgtcatttttaaagggctgctcattgcggaagggtctgtgaatgagctgacgcgggattccgacaagcaggaaatacttctggaacatgcttccccggaattgatggaacggctgaaggagatggtgaaggaagacggccgtgccgtttggctggaggatgggcatccgcgcaactccctggaaagcgtatttctaaaaagtttgttggaatggaaggaaaagcatcccaatccggaaccgtaagcggtccggcggctgccaaacgggaagtgcgccgcatgatacgtgaaagggtgggcggattggatgccgccgcccgggaagccatgtcccgttccatctgccgccgtgtgtcggctctggtgcgggagaggaagttccggcgcgtggctgtttttgccgccaggccgggagaggtggatttgctttccctgctggatctgcttccggaccgggaatggtacttcccgctggtgcatgaggggagaaggctgagttttcaccgtgtatgccatcacggggaattggtggcgggcagctggggcatacgcgaacccggtccgggatgcccggaactgcatgcgggggaaatggatttgatcgtgctgcctggggccgcatttaccagggacggcaagcggctggggtatggcggcggattttatgatacgctgctggccggcccggctgctggggtgccgctggcgggagtctgcttcccctgccagcttctggacgatctgcccatggaagcccatgacaggcatgtggacatggtgattgcgccgggaggggagtaacacccttccggagaaaaggaaagaggctagatacggaaccggtgtttctgcacggtcagtttataaaacaggtcgtagcgggcgttgagcaggggctggaggtattctacccctccggctacctggccgcggatgtccgcatacagttttcggtagtcggaaagtccgctgatcatggcttcatacaggggggtgcgcaacccgcattccacggcaatgtgcatttccgccgctgcggccacgatctggcgggacaggcggaactgcatccaggccagccccaggttgccgcccacccagacggccagggccgcgcccacgcaggcgaaccctgctgcgtgctctccgaaacagcccagcagggctcccagaatcaccagaaggagcatcagcttgatttccgtcctcatcacatcctcctgatccagaaaaagcttgctgaggcacggcttgatgccgaagtccttcaggggcatgtaaatggaacgtcccagcctctccttgtacacttccagatccgtctggagctttgcggccgggaaatcccctatgtcgcagtcccattgttccttcacgcgcgggcgcacatggttccaatgcgtctggcagatgttcaggaattccttgttgtaatacgcgtgccgttcctcaatgccggatttgaccagctcataaaaccattcgtcaatgacgggaggaagcttgtgcaggatcatcgtgcgccggatggataggaaacgccccatctggcgtgccgactttttccccagacgcggcacgcagtcctgcacgtattgcgcgtacgccttgaggcgtgccggcatttcatcctccatctggagctggatgcggtcgatttcccggtcaatagacgtcaggaagccggaatccatcttggaaaggcggctcagttcatcaagcaccttcccctgttcttccagaaggctgtccgtagccagcaggaggcgttccacgcgcttgtccgtcagcgggctgcgtttcagcacttcctgaacgcatgccgtcagggcttccactccttcccctgcatgctctccggcggtcgtgacagggtacagaggcagctgcacgcccaggtgttcccgggaggtggagcgtagctcctctttcaaggattgaagcttctcaaaggagagcagctccgcatgggtgatgacgagaaccatgcgggaatgaagacgttcctccagcgtccggagatagtcccacagggcggaatggttgccgtcactggcggaaataaccacaaggatggcatccgatttgggaacgatgtgcttcagctttctgggggcatcctcctgttccaggccgatggtatcccagaactccaggttgagcagggcgtccgacgggtaaaaaaggtccagaacccattcatgggtgtgtggggcgggatgaggcctgtactgccagcggaccagtgtggcttcactggacacgcgggaacagaactgttccccggccagggcgtccagcgtagaggatttgccggaccctgtcatgccgatgacggtgacattctgcggagagcagcattcggccagggcttcctccaccttttcctgggaatcgaaatgacggtcggggccgatgcgggcggaaaacgccgcggcggcatccgctacgtcccgcaccgcatgcggaatcacgttttttcctcctgtcagcatggggtgatgaaatcaggtctccgtccgggctgttccggttttccggaacaaacctacacgccgcttttccttctgtccaactaaaatcacgaagcgggagcgtacgagcggccgccgaaaatagccgtccctacgcggacgagcgtggctccttcctctattgccgtttcaaagtcgtggctcatgcccatggacagttccgtcagcgtggctcctcccctgccggacaggacttccttcagctcccagaggcggcggaaatagggccgcgcctcctccggattttccaccggggggggaatgcacataaggccggcgatttcaagatggttcagggaggacagctccggccattccttttccagggtttccgggaagaatccgaacttgctgtcttcattgcctacgttcacttccagcaaaatgcggggacgttttcccgtttcctgagccacgatatccatgaaccgggccaggcgcagggagtccacggcatggatcagcgtgaaatattccagggccttgcgcaccttgttgcgctggagggggccaatgagatgccattccgtatccggaggaagggaggggatttttcccagtccctcctggaccttgttttcaccgaaaatgcgctggcccgcatcatggcacgctttcacatcctctgcgggaaaagttttgctgacggcgacgaggcggacggaacctgccggacgtccggcgcggagttccgctgcgcgtatgcgggagagaatatgttccagattttgttggatgctcatgatggatggttcagttcagggatggctgtgcggacgcgtggctcatgatatggtgcaggggagagagccgccgcatggccatggcccagaccttggaagaatccgtttccaggcaaatgtccggcaccatgggggaaacataccaggcacggtcattcagttcccggcgcagctggggcggcgtccatccgctatggcctacataggcgcgcaggatggcgcgggggtcttccaggtattccaaggcctgttcctcttgcagatgaaactggacgcgcaatttatcctccgtgcggatgaaagcggcgaagatgagctggttgcgttctacgggccctcccttgaagatgggcacggcgtaaagggattccggtatttccgtatggcgggctacgtcccccacattcatgccggagggatgattcaaaatatggccgatgacaaattccttctccgcccggctcaggaagatgacggaatgatggaatccggcgccatccaggtagggggcggcaaccagaaggtgccccgccaggttttcattgctgatatcttcgtgttccatcatggccataaatctacgttaccaaatgtgacggatgcaggcaaccatgcgttcaaacggccatgtcaggaggcggtgaaaacggaacaccggaaaaacaggagggaaggggagcttttacccgagtgtatagcgagtccctccagaggaacggacggcggttcttgaatttccggacgtcctgcgggcgaccgccctcctggagggaacggattttttcccggttgatgccgtttgcttgcgggaaagggcaacggcgggggggcgggaagccctgcggcggtgggaaatgacggaggccgtattggcgttttccatgcggtctggagcggaagccatgaccagcaggggagaatcctgcattttttccgcctgggccagggctttcagggacgcgtcaatggaacagcgttcgattacgaccgggtctccggtacggagcaggttgaaggcctcatatacgtcattgctcttcatccggacgcagccgtaggaggcgggggtgccgatggtgcgttcctccgctgtaccgtggatataaatcaggcgcgagtgagcgttccggttacggggttccaggccttccagccacatgatgcgcgtgacgatggggtcccggcccggagaattgggcgcgacgcattccccggtgggcttgcggcttttaaacaccatgcccttgggttgtccgctgccgattttggaagcgatgcgatgggcgcccagaggagtgcggcagcttccctttctgtctcccaggccggatttggaagtgctgacagggtaggtcttcaccacccggccattgcgcatgacggccattttctggtccctgacgctgacgaccgcgccgtctttcacgatggcggtgggctcataatccggacgggaacaggatgccaggactccgaacacagcgaaagctgcgccggcgagttgaatcaggcgtgctgcttgcgagagaggcgcaggcatgggaaaggcgtcagttcttggctttggcagtttgcttggcgggcagcaggttggaaatcatgcggcccagggaacagaaccctgtgtaatagaaacccaagaaaggaatcatcaggatgggggaaaggtaatggccctggcggatcatgatgatgatcaggttcaggaagaaagttccgcaggcgatttccaggacgggaatgacgacggatttaatagcccggtatccgttgcgtttgagctgggagacgtgcaggcggtcttccttccggtccacgccgtatttgggcgtgcggacgaaggcggactgatggccaaagatggcttccagaacagccttggcgttgttgaccgccatgcccacgctcagcgtgagaaggagggggaggtacggcagttccttccaccaggatttgggacgcaccacgatttgggcgctcatgtaaaagatgcagacggccacgctggtcatgaagaacagggccacattcacaaaccacatgaagaccgtttcattttccggaatgcgctgcgtgcagatggggtacaccaggaagcagagcaatgccaggagcaggtaggaataattgcaggtgaggtgggtggtggcttctaccttggctttaaggggggcattggagcgccagatgtccagcaggattttctggcagacctgaatggaacccttggtccaccggtgctgctgggacttgaacccgtccatgtccacgggaagttccgccggggtaacgacgtcgttcaggtagatgaagcgccagcccctgagctggacacggtaggaaaggtccatgtcttccgtcagggtgtcatgggaccatccgcctgcgtcgccaatcacgcacttgcgccatatgtaagcagtgccgttgaaggtgaagaagcggccggaacggttgcgagccgtctgttccatggcaaaatggccgtccaggtacatcccctggatgcgggtaaggagattgtattcacggttgatgtggccccagcgggtttgaacgaggcccacgttttcatccgtgaagaaatggatggttttttgcaggagatccggttccggaacgaagtcagcatccagaatcagcaggaattcccccttcgctactttggtagccgcttccagcgcgcctgccttgaagccggtgcggtccgtgcggtggatgcagacggcgtcaaagccgcgggactttaattcctccaccttgcggtagcattgttccgtggtgtcgtctgtagaatcgtccagaatctggatttccagcttgtcctgcggataatccagagcggctacggattccagaaggcggtccacgacgaacttctcattgaacatggggagctggaccgtcacgacgggcagttcctggaagcgtgctttgggctggggcttgttattacggttcttccagtacaggtaaacgatgctcaggcggtggaagccatatcctgccaggccgacgaggaccagaagatagcacaaaagccagataaaattgtaatttaaagacatgcagggggtacaaagggggttggtatctttttgcgtcagggaagggggatttccttgacgtgacgcccgtataggacaccatagggcgagagtcaagacatattccgttttgcttaacctttttgagtgttgttatgaagagattgtatctgctggccgcagctgtatccgtcacggggggaatggcgttttccgctccacaagaagatgccccggagcaggaggcggcagtactggatgtgcaaacgccgccgtccggcaagcaggaccagccgaccattccggaacgcctgctggacgactcccacatgaatgaggagctgggcatcaacgaatttaccgcgccgtccatccgcaagatttttgaagatttggaggggcttcctgaaataccggaaaaggtggccttgcgcgcacgcccggagcggcctcccatggaccgctgttccctggctctccagttgggcggcatgatggcggacggcttcgtaatcgtgcagtgcggcaagatgaatgaggtgaaacccattgctctggatctttccagctatgcaaaggccattggcgccggagagagggtgaaccgccacgccgccagcctgctgaaaaatgcggaagacggggatttgagcagtttcaaaaacaacctggcccttattcaatccgatgtggaacaggaactcgcctccctgagggattccgatatggcgaacctgatcggcctggggggatggatacgcgccctggacgccgctaccgcggctctggataataaatttgcggaggacaaggcaaaagtcattttccagccggatgtcccggaatattttcattatattctggacggggtggagccggaaatgaaggaacgccgggacattgccaaaatcatgaaccttctgacggtcttgcaggagcagatgacgctggctccggacgccaaacccgtcaaggccggcgtggaagccatccgcaaaacgacgctggagttgctcaaggcggctctggcccctgtggaatcataattcctctctccggcaggcatacatctatggttcttccccttttgaccagtctggaagtgcgtcttactccccgcagcctgtacttgcggaatgaaaaactggagcggatgattcgggatgatggccgcatcccggtgccttacaacgtaagcatccgcaatgcgggagacggcgccgtgcgcatcatcggcaaaaagtggaccgtccgttcccatgaagacggcacgcaggtgattgaaggggatgaactgttcggttcacgccccctgttgtgccagggacagatttttgcgttcaacggccttcagatgctgcggctgtaagcgcgcatccagttgactctccttgtccgggacgaggcgggaatcctttatcatacggatcccgtcagccttaaatggtgaaataaaaagccctgcaatattcatgcagggcttttttctggataagggatagaggaagaatctgaggataaaagtctataagttaataagactgttccttaattcctacttcctctaattgttgcttccgggctaaccttcttcatcatccccgtggttgaggatgaagttcagatcgtcaatgcccaggctggaggtaaacccttcgtcacccagcacgttggcgacgagctggtttttctgatgctggagaatgcggattttttcttccacggaatccttcgtcagaaggcggtaggcgatcaccttgtttttctggccgatgcggtgcgtacgatcgatggcctggctttctacggccggattccaccacgggtcatatagaacgacataggaggcggaagtaaggttgagggcggcgccgccggctttcagggaaagcaggaagacggaggggtccttggtcgtctggaatttttcaatttctccgcggcggtccttggtctggccggtaagatagttaagcggcctgttttccgcttccagcctgttcttgatgatttccagcatggaaacgaactgggagaagacgagcactttgtgcccttcttcccggagctggtccagcaggtagaagagggctgtcattttggcactgtcttccttggcgtatttgggatccaccaggccggggtggcagcagatctgacgcaggcgcatcaggccctgcaaaatggcgaaactgttctttttgacggattcgtccgaatccaggccgagcagggcctgctgaatgcggcggagttccgccttgtacaactggctctggatgccttccattttggcgtacacttcttcttccgtcctgggaggcaggtcttttgccacctgggatttggtgcggcgcagcaggaagggtttcaggcgcgcggccaggcggttctggctctgcgggtccttgcgcttgtcaaagcgcttcttgaagtaggagcgggaaccgaggactccaggcatggagaaggccatgagggaccacatgtccagcaggcggttttcaatgggtgtgccggagagaacgagacggttgtaggaaacgatttcccgtgccgccttggctgccttggaatccgggtttttgatttgctggccttcgtccagaataaccgtaagccatttgatttggttcagggtttccccgcagacgcggagctgggcgtagttgaccacgaccatgtcgtaattcttcttgatgtcttccagattggcctggtccttgctgcggatgacgaggacgcgcacgcctggcgcaaatttttccgtttctcccgcccagacgtccagcacggatttggggcaaacgataagaaccggagggatgacgacttttttcttggatttgtttttgcgggcgaattcttcacgcagccagaggacgtaagtgatggactggatcgttttacccaggcccatgtcatccgccagaatgccgccgaacccgttcgtggcaaggtaagccaggaaatggaacccttccacctgatacgggcgcagggtggcctggagctgggagggaacatccggcttgacgtcgatctggatttccgcggtacggtccttgatgcgtttccatgcctttggatcgaacacttctgcggctttcgggtccgccagctgcatggcgtgcatgcggtgggtttctccggaaagatcgaaggggtccaggcccaggcgggtaacggcgtcgcgctggtcattgtccagtttaatttccaggcgcatccatcctccgtcgtccatgcggacgtaaccgcctctggcggcgaccagggcgcggatttgctccttggagagctggacgccttccacatcaatgacgatgcggaggtcaaaccagtcgatttcctggttgactacttcaaaccgcacggcggcagccaccggatccgccagcagcgtcttgagcttgtcgtccatattgacggtcagctctttcggaagctgtttggcccattccgcgaatttttcggggaactggcgggtgacgcgggccttgaacgcgcccacctggggatcataggaaaagcccatttcttccagcaggccgggaatgggataaaggtgctcccggatgaagcgcagcagaactttgttcttcatgggctcctgatgggatacgtcccagccgtccttgccgagtttttccgtgcggtagccggaagcgtccctggcgcttacttcgcagagcacgtgttccgtttctgcagaggtgaggccgcggacgattttcatgtcaaaggtgccgcgcaggtcgatgtccaccacgcggtcttccatgctggggggcagggaagcgcctattttacggaggaattccaccccttcaaggctgtcgatgacctgcttgggaatggagtagcggggttccacttccgtgctttccagccagcggggggggccgggaaaaacggtttcgtcagactggtacagttcctgctgccccggaagctgccggacggagtgggagacgttgatgccggtggaagttgcaagctgaagagcgtagcagtccggttcaatggggtcgtcctggcaaatccatttgagcggttcgtccaccactttgaaataattttcatcaaggttcaccaggtagcctttcagggcgggctggtggaaaagtttgttcatcagggcgcatgcggcttcctggtccagatccagcgtcagggcgtcttccgcacgggcgtagtcggacagggagacgagcaggatttccgtctgggcgtccatgcgtacggcagcccgttcatgcagattttccagatgttccagatcctgtttttcccggacgggaatccagtcctgcttcagggaatggcggtattcgaaatgtccctcgttaatagtggaaacaagcctcatgaacagttctccgcggggcggctgcggggggcgttcattcacggattggatgcggtcataccaggtgccgacttcacgggagcgctcccattcatgaatcttgcgctggaccttttccagatccgtaatggattccatgaattccgggtagggcaggcgtttcttgttgaaggcgtaagcaatgtaattccagaatctgaggatgtttgtgggaggcacgggccacaattccagcgggtcatagctgacgatttcccatcggggattcaggcgcaccatatcatggtcgtgaatctcctgttcaatggcgaaacggcggtagcgcttttccagtttgctgacatagtccgcttccttatcgtccagttcgcgtcccagtttctcttccagaatatccagaagaggaacatcattcagttcgttcggagattccggaaggtcctggccacggtacatgcgctccagcatggcggcatacatggccgctccggccagatcctcgtcttccgtggaacatgctccgaaccacctgttgccctgaaggcgcagattcacacggtgcacgccgtatgtgtcttccacgcggccctgaatatataaatgattgccaaaaatttgcgtgactgcgccatctttctggagcttctcgccgcgcagccggatttcttccggaaaggcattgagaaagttcagagtagccctatccgggttaagtgccatgctcataatatcagactgtcatataaaaattggaaacaaacgttccctgtcaagggacgctacaggtctatgcactttactatggcacaaaaagcggattagagcaactattctctgaaaataattccaaaggttgtttgtgatgatgttcacaatgttgaatgacaaattgttatgtctatatgaagaaggccggttcttgaagaaaacgaacatattttatcatcttggaaagaaaggatgtcagttttgcgtaatatggttcttgacaggttcgccgtaaaagcgtcttttatgcctgaaattttatgtcctctgcatcacttctacagttactggcgactcaagcccgcttgagcgatggcgaattggccgaacgtcttgacatgactgaagaagccgtgcgagcccagcgggaacagtgggagaaggaaggcgtcatcctcggataccaggccgtggtgaatgaggaatatgaacacgacagcaaggtggcggccttcattgaagtgaaaatgacgcctgaacgcgacggcggttttgaccgcctggccatgcgcatttcacggttcgacgaagtctcctcctgctatctggcaagcggcggttttgacctgctggtgttggtggaaggaaaaagcatgcgggagattgcccggtttgtggcggaaaaactctctacgctggaaggggtgttgtccacttccacacacttccatctgaaaacctacaagaaaaacggttgtgtgtttgaagctcccgtgcagacagaacgcctggctgtcgctccgtaattctctgccgttaagaaaggaatgatcatgaattggcagaacaaaatagcggagcaggtaagctccataccccgttccggcatccgggaatttttcgacctggtcacgggacgcacggatatcatctccctgggcgtaggggagccggacttcgtgacgccgtggaatatacgggaagcggccatttactccctggaaaaggggcacacctcctacacttccaactatgggttggaatccctgcgccgttccatcgtcaaatacgtggacggattcttccatgtcaactacgaccccctgcgcgaagtgctggtgacggtaggcgtaagcgaagccatagatctcgctctccgtgccattctgaatccgggggacgaggttctttatcacgaaccctgttatgtctcctatgcccccagcgtcaatatggcctacggcgtagctaccgccgtgcctacaagcaaaagggatcttttcgccctgaacccggaggtgctggaagcgtccattacaccgcggaccaaggtgctgatgctcaacttcccgacgaatccgaccggagcggtggcccctgtggaaacccttcaggaaatcgcccgcatctgcatcaggcacgacctcatcgtgctgacggatgaaatttacagtgaactgcgttatgacggcaagccgcatgtttccatagcttctctgccggggatgaaggaacgcacgctcctgctgcacggattttccaaggcattcgccatgacggggttccggctggggtatgcctgcggtccggaaccgcttatttccgccatgatgaaaattcatcagtattccatgctctgcgcccccattacttcccaggaggcggccattgaagcattggaaaacgggacatccgccatgttgaagatgcgggaaagctaccgccagcgccgggattacctggtgaagcgccttaatgaaatcggcatggactgccacctgcccggcggcgcgttctatgtcttcccggacatttccaaatttggtctgaccagcaaggagtttgccacccggctgctgatggaaaagcaggtggccgccgtaccggggaccgccttcggcgcaagcggagaaggcttcctgcgctgttgctatgcgaccgcctttgaccagatcaaggaggcctgcaaccgcatggaacatttcgtggaaactctttcctgacccggcagtgtgcatgaactccgtgacggaggcgctgaaaacaaaggcgtatgtggcgccgtttgcgatattcatgggctttaccctggtgtggcagtttggcgttcccttgctggaatgggaccacccggccgcaccctggtggagaagggcaccggaacaatggctgtatcccgttcaggcaatcgtttgctttgccctggttttccggtggagaaaggccattgattgggattggcggtggaaacccgccgcctggggaatcctgttcggcgtgctgggtatcctgtgctggctggccccgaccatgatagcggaccgcctgcccggaggggcggatgcctggtttgggcatccctcctggccctggtaccggtatctgctgggaattgacgcgcgcccggatgggtttgagccgggcgtcgtctttcttgcgggttcctggagctggctgggggctctggtgctgcgctttttccgtgccgtggtcgtggtggctctggtggaggaacttttctggcgcggctatctgatgcgcctgatggtgaacccggaccatccctggaaggtgccgttcggcacccatagctggaaggcatactgggtgactaccctttgtttcatggcggtacaccagcctgtggactattgcggcgcattcgtttacggttccctggcgtatctacttgccgtctggcggaaaaacctgtgcgctgtgatcatgatgcatgcggcggcgaatgcgttgctgggatgggccgctctggaatggggtaaatacggattatggtgaatccggcatttacagagaggattttcttaagtacataaaagccgatgactccagaggaagccatagcaattttatgggattaccatcacgtgaagcaggaactgcgtccggcggaactcatattcattcttggcagcaatgacataagggtggcggaatatgcggcggaactttatgcccggaagctggctcccctgttgctgttttccggcggaatggggcgttttacaggggaatgggccgtaccggaagcagaacttttcgcagaggcggctatgaaaaagggagtgccgggagactgcattctcattgaaaacaaatccaccaatacgggagaaaatgtccgcttttcccgcgctgtcctggaaaaagccggcattccggaaccatccagcatcatcgcccttcaaaagccctatatggaacggcgcacgctggctacgctccaggcccagtggccagaagtacgggtggcggtcagctcccctcctttctcgttcagggaatatctgaccagggagctcccgcaggatctggttgtttccgccatggtgggggactttcaaaggatactggaatatcctaaacagggattttccacggaacagcctgtgactccggaaacgatggcggcattccgcacgctggtggaagcggggtatggctcccagctgctcaagggtgtcccccttccttggaattcttgagaagacacgctttttgcttttactgaatgctgattgcgggcatcaatacaacccgcatagccaacccaattatataacttatcatggcagacagaaccaacacagaccccgcccgaatggaaaaaatcgtgagcctctgtaaaaggaggggattcatcttccagtcagctgaaatttacggcggtctgaacggttgctgggattatggtcccatgggggtggagctcaagcgcaatctgaaagaatactggtggcgtaaaaatgtgcaggaacgcgaggatgtggtcggcatggacggttccatcctgacgcataactccgtactggtggcttccggccatgtgggcggattctccgacccgatgtgcgattgcctgttgaccaaggagcgtctgcgtgcggaccaggttccggcccagagcggcatggggtttttctataccggggccgccaaaaaagacggttcctggaatattgaaaagaagtactccgttctggtggaatctgaaaaacaggcggacaaggctcgtaagaccgcggctcaatattatgcccagctggccggcaaggatgcctcttacaaggatatggagctgaaaggcgagtgcatggaaaccgtaacggattccaccatgtacaatcctgctaacggttctctgctgacggaagcccgtgagttcaacctcatgttcaagacgaccattggagctacctctgatgaaaacgatcccaacgctacgggctggctgcgcccggaaacggcccagtccattttctgccagtataagaacattctggacagttcccgcgtcaaactgcctttcggaatcgcccagatcggaaaatctttccgcaatgagatcaacccgcggaacttcactttccgttcccgcgaattcgaacaaatggaaatcgaatatttctgctggccggaagacgggctgcgcctggtggatgaatggctggaacaccgtctttgcttctatgacgaagtgggggttccgcgcgaacacattcacattttggacgtgccggacggcgaacgcgctttctactccaagaaaacctatgacctggagtatgaattccccttcggcatccaggaactggagggcatcgcctaccggacggattatgacctgagctgccatcagaaaggttccggccgtcctctggaatactttgacgaagagacgcgggagaaattcattccccatgtggtggagccttctgccggttgtgaccgcaccattctggccattatctgcgaagcttacgatgaagaggaactggtggacgacaaaggtaaaaaagacgtccgcacggtgctgcgcttcgtgccccgcatggctccgatcaaggcggccatcttccctctgcttaagaaaaacggggaacaggtgcgtattgcccgggaaattgaaaagacgcttcagccgtggatgtccgtcttttatgatgaaacgggagccgtcggccgccgttaccgtcgtcaggatgaagtgggtactcctttctgcataaccgtggactttgaaactctcggggaaaatgatgcttcgctcaaggggacggtgaccattcgccaccgcgactccatgaaacaggaacgtgttgcaattgaagacctgctgcattggcttattgcccgcatacgttgatgttttttcagcggctttgatgccgaaatgccttcagagccgttccgttgacagcggaacggctttttattttcaaaacagcagtgaaaaaagggggctgaaaaaacgataccgggcgtgatttttccagaagagagcccgttgttccggagtcggtatggctggaggtctgtgcgattttttgatgctgctatgcacggctgggaatggatatttcttatatgttcactggaagcatatggaatgaaaattcaatgagagttattgacgtcccgccagcaaaagagggaaaatgacgggtgaggcggttcaggaaaaacgtcctgatttttgagcttttttttatcctctgctgtcaaaggtttgtacggcatggaatgatgcgatcaagtagaaagaagatattaatgatggaacattcagtaatttttccggaccatcggaaggtttgcgccctggggcagggaacctggaaaatgggaaagtcagcgttgagggaagccgatgaaatagatgctttgcgcgccggcattgagctgggcatgagcgtagtggatacggcggagatgtatggcaacgaggaaatggtgggagcggcaatccgcggtttgcgcgaccgtgttttcctggttaccaaggtgttgcccggcaacgccagcaggacaggaaccaaagcggcctgcgaacggagcctgaacaggctgaagacggattacgtggatttgtttctgcttcactggggaggtccccatcccattgaagatacggttgcttcaatgattgagctgcagcaggagggaaaaataaaagcatggggcgtcagcaatatggacgttccggaaatggagcggttttacgccgtcccgggaggagtttcctgcgccgccaaccagattctttataatctggcccatcgaggtgtggagtacgatttgctgccatggtgccgggaacgccaccttcccgtgatggcctattcgcctgcggatgaagggcggctttcccgtaatccggtgctgatggagattgcgcagaagcatgaggccaccccggtgcagattgccctggcctggattttgcgctgccctggaatgattgcgatccccaaagccggttccgtcacgcatgtgcaggaaaattaccggagtttgtccatcaggctgactgcggaagatgtggatttgctggatggggcttttccgcccccggtcagaaaggtgcatctggattcctggtaaaccgtgatgccgtccggcagtcggggtgaagcgggacgcgcggattttcctgccgcatcagaattgtttcaagcctttcatctgtccgggatgaaagggcgccagcgggtaatttcaatacacgcactccttgtgggtagggtattggctttttgttcatgcggccggggaatcttctgacgcgtttccggaaggggacttcccggtttttccccttgaacagaggatgtgccgttttccggttccggcttcttcagtagggaagaagattgaatgcggctgaaagaaagccgcccttccgggaatacggcattccggagaggcggctccagaggaggaggcaggataataaagcgctacagcggctgagcgtccgtcctgggtatccagacgggcgtgttctggaaggtgctggcgtagtaccaggagccgcgttccgcgcgcaggatgagcggggtggattccggaagggtgatgagcgcagggctgttcatgtccgccgcatgtctgccgggcgttttttgggtaacgaccagcaaccgatccgccggaatggattccggggtttccgggtacatgatgtagttcatgacagccgctactgtgaccagcccgctaagggtggccaggatggtcagcagggccccgtgtctgcgggtaacggtcagcagggccaggaaggtgagcatgacggctccggacaggatggagatggggccgagcgtatcatggcggatgtaagtgagccactggttttccgtggtgttggcgggcaggatggcgccctccttgcgttcgatgaattgcaggttgtattccgcttccgtgaagtacggggagagttccagagcacggcggtaattgagagcggccagaccgggtttgttcatgcggtaataggaattgccgatgccgaaacaggcgtaggcgcgttctgccttggaaaggttcatattgccgctttccttgctgaaatagtcaatggctttggcgtactctccctgttcataggcttttacacccaggttgtccgtttccgacgcgtttccggttgctcctgccagggacagggccagtacgacggccatcatgagaacgggaagcttggcgatggcttttttaatagcctggagcatgtgctggcgttccgcgtgcggcagttcttccgaagattccgaaggcttgaatgccctgtcgtcccggagttgaaggatatctttcattttttcattctgcttggaaggtggaatataggattcaataaagttgtaggcggcacgcaggaattccgtggagcttgcctggcgcggagtggaagcgagcctgcggaaggctctcatgcgttccctggccgtgaagctttccttccggattttccggatgtagcggatcagagccattcccagcaggatgacggcggggatgtaggccaggaaataccacccccagtgagccggagcggtaagggcgttcatgacggtggcgggcatgagcccgtaaatatccgtcatttcagctaccggaatggtgcctgccgggggaggcgtggcgggagcggcacctccggccgccgttccagtaatggctgaggccttccattccaggggaatgggggctgtggttacggttttgtactgttgcgtgctggggtcaaaaaaagtgagttcaaagggagggatggcatccgtttgggcaaccgggcgcatcatttgctgaaatcccacggttccctggatggagcgcgtattctggcccgggtccagcttgttgggaggatagagtttccagttggaggcgtctgtgagggccgggcaggcgatactgtggatattgcctgttcctgttaccctgattttaacagtaatgggttcattggcactgagatcccgcgcatccgtggtggaggagatgcggaaattccctacggcattggtgaaagaagagggagctcccggggggagttcccgggctgtgattttcacttccggaatggccatttccaccagtacttccgaacggatgaagttggcgatgagagggtccgcctccggcagggcggcgcgtgccgtgacagtgccggacgccgttacctccccggcgcgcagcgggaacagggtgctctggaaggtcatgacattccagttgacgcctttgtaaagtacagaaccgcgaggctggccgcggagcagttccaccagcgtgggttcaaagcgccaggtagccaggttggaggtggtgatggcgggcgccgtgtattccagaatgtattccggggcgtaaattttcagttcgcagcggtccggctggtggacatagggtttctggttgtccacatgccacagcatgccgtacgggactgctgtgccgttcaggttcagcgtattccatttgatggcgctgtaagggtagacagtcagcgtctggggaagcgtggtataagtgcggccattgttggcctgcagggtcagggaagggatttccacggtgcccacttcgtccggcgttacttcaatggccatcaggaaggcggattggttgggagaccccggccagcggatgtagttgccctggctgacccagcgcaggctggcgccctttacccggggaagcgggtcctggcgggcgatgcttccgtctgtcaggatgatgaagagacgggtttgttctcccggcacaacggcatcggacagccaggtggtaaccacctgctgagccataagcgtgacagtcatgcagaagaaaagcgaaagaatggcgagcagttttttcatcttgttttgcgggatatgtttaaaggggtggcttcgcggatgcgggcggaacgggttagtaatccttatccggaggaatttccggagaacgctggggaacggggcagccgggttcaatgtccctgcgttccattaggatggctcttgcttccctgcgttccttttcctccctgctttccttttgtgcggctgccggaacgggcttgttatcttccggctggggctgcggtttttccattccggacgtttctggcagcctgtctttttccggagaggagggaagccgggcatttttcatttctttttcgtccctcttgccttccttggtttcggcgttatccttgtcttggtccttgtcttggtccttgtcttggtccttgtcttggtccttgttctggtccttgttctggtccttgttctggtccttgttctggtccttgttctggtccttgttctggtccttgttctggtccttgttctggtccttgttctggtccttgttctggtccttgttctggtccttgttctggtccttgttctggtccttgttctggtccttgttctggtccttgttctggtccttgttctggtccttgttctggtccttgttctggtccttgttctggtccttgttctggtccttgttctggtccttgttctggtccttgttctggtcctgttgttttttcttctcttcttccaatttcttctttaattcttccagctgcaagcggtattcgtccagggatttatcataacggagcatttcctccttgttggacgcagctccttcatgggaaccataggcagagagagcatcgtcaaaacgtttgacggcctccttaacatgttttttcgcaacgggtatttttgccagccgggcgtcaatttccttaatttggtcgtcaatggaagagggccgggcttgctgctgttccccttccggcctggagaaagtcatggttttgcgggcctgggcggcttccaggttgccaaggttgaagtgggaatccgcctggagggctggtttgggagaaaggagcgcctgggagaaagcttccgcagcttctttggggttatccgctttttgttccaggcatcctttggcgaattccaaggcctggcgcgtttcttccgccaggtcgggaacagcgagcatttcatcaatggatttgacggcttcttccgtttttcccgtccggatcaaatccgtgacattgtccagggcgtgcgtgtccgcctgcgcttcctggcccagcaatccggcgcagaataacgccgcagcagtcagagatgtcataccgcggcgtccggaacggcggaaggaacgccagcgtgttcccgccagaagggtgaggagcaggcagatgagggccggaacggcaaagatgatgtagcggtcattcggcacgcggcgcacttcttccttgccttccgtggtatccagccggtccgcgatgtccttgacgaagcggttcagcgccgctccgtcggagagttggacatattggccttccgtttgcctggccaggtattgcaggctttccggattgagcttggagacgacgtgctggccacgacgatcccggtacaggccggagggggattgctcatccggaatagtggtgccgatagtagtaccgatacccgccgtcacgatgataagctggtgctgccgtgcggcttccgcagtcttataggtgatgttgacggtgtcttccccgtcgctgaggatgaccagggcgtttttggcgtccgcttccttgtcccgtttgaaggtttgaagggccagccgcacaacgttttccaggttggttcccccttgggagacccagccgaattgaagttgttcaatggtttcttttaatgcgttatggtcatgggtaaggggcatgagcaggacggcgtccccggagaagatgatgatgccgaagttgtcccccggcagggcgtccagcaggtcgtaggcggcggtttttgcccttcccaggcgggttggggaagcatccttgctgagcatggaacgggagcagtcaatagcaatgaggatgttgcgcgatttggggatttcctttacctccgtgtagccgtccaccgggcgcgcaatggagaggagggcgaagatggacgccagcacggcaaagatgacggggagcacccggtgccaggtggccggagcgtgaaccagttcccgccggtattccggcgaaacgagtacttcccattttctggaacggcggcgccacagccaccaggccgccgccgcgagcagggccgggagaatgagcgcgtacagaacgttgggataaaggaaagtcatgacgggtgaagatcggtattacggggcgggggccggtttgagcacttgcagggagaggcccagaagcgccagcgcggctcccgttacaaggaagtacatgaagtattcttcaatgtggcggacagtttgcactttggcctcgcttttttccagcttcccgatggaggtgaacgctttattgaaggaggccatattggtggccctgaagtgttctccgcccgtgagctgggctattttccgcagggttggttcgtcaaattcactttgcaccaccatgccgttcgccagggttccttcttccgtgcctacggcaatggtataaattttaatacccagcttggccgcgttttccgccgccaccagcggggatatctggccggagttggaggcaccatccgtcaccaggatgatgatttttgatttggtgttcttacggtcgtccagccgggtggccgccgccgcaatggcggagccgatggccgtgccgtccgcctggatcatgcgcggatggaaatcccggatgatgctgttgaccagggcgtggtccagcgtgagcggacagaaggattttgtttttccggcaaatcccacgataccgatgcggtcgtccggacggctgtcaacaaattgggtgatgacgtgtttggcggctaccagccggttgatgggcattcggttgagaaccatgtccggcgtttccatggagtaggaaaggtcaaaggcgatcatgatgtcaatgccgttgactgtccggaaggttttatcttccacgtgctgggggcgcgccagggcgatggcgatggcggcagccgccagaacgaagcaaagggcccctattttccctgccagggattgcggagtacgcgccagggaagcgatgaagcgcacagtggggtaggtgatggagccttccgccccgcgcctgcggcggaggatgatgaggcacaagatgaagggtaaggcataaagccattcaggttgcgcaaattggaagtgttccgtcatggtatgctaacgttggttgaagcgggatgaagattttttgacgacaaggtccgtttcttccttcgtccggtgggcatccgcttctatatcattgatgagttggaccgtggcgtccgccaattcgttgaccatggaatcgttttccggggtgtccggttcatatttgagagaagccatgcggtccagcagatcgcgcgtgggggcctggagttcggaaggcagcgcggtgagcgcgtctgcccggcggttgaattcctgctgggtttcatatagtgccgggtctttggtttctcctaccaggtatttgcggaggatcagggaaaattccacggcggcctgcctgagggagggatgcgtgttccggagcatcgagatgtcccggatagcggtttccgacgggctgagcggcgcggcggggatgcgtccctttctgcggatgagcacgatgacggcgatagcgacggccagaaggatggaggccaaaataatccagatgccccacgcatcccaaaagcccgcttggaagtaggcatccggggattgtgtttccatcagggagggaaacgccggcggttccggaattgccgtgggggggggctgaaaggtggcggggggtggcatggctgatagagaagaggattagcgtgaaaatttacgggatcttctggcaaaaagggcccggaggggaggcatgaagttgtctgtggtctgcaagtccaggaagtcaatgcccaggcggcggaaatcctgcgtccatttctcgcggtgcagatgaacgacgttggcgtgggtttcccggacatcctgacgggaaaggttcaggaacatgcttttgcctgtttccggatctttcaggatggcgcgtccggcatccggcagatgcagttccatcgggtctgcgatgcggatggggatgaagtcatgcttgaagttgagctgccccagggcggctttattgttctcaccccagaagtcactgatcatgatgaccatggccgcttttttctgggaaaggacaagttgccgggctacatcggaaatgttctggtcggctccatcgtttttactggctacgatttcgcggacgatgcgcagggtctgcttgactcccttggccggggggatgtaatgggagtggctgttcccgtagatgaggaggccgcatttgtctccgctctgggcagcgctgtaggcgagcactgccgctacttccgccgcatagtccagtttggagacgcgggccgcggaggaggcgtagtgcatggagccgctgacgtccaccgccagaatgacggcctgttcccgttcctcccggaaacggcggacaaaaggggagttcatcctggccgttaccttccagtcaatgaagcgggggtcgtctcccggcatgtattcccggaagtcgtcaaagtccagcccctgtccgcggaagccggactggtattgcccggcgaagttttccgtggccagatgcctggcgcgcagttcaatgcggcgtacgcgcttgagaatgtctgaggctttatccatgaaatgattttccctgtttgggttcaatcaggttccggcaaggcgccccttggggcctgaaggataagggcgggcgcggaagcgtccgcctcctgccgtcacggcacggggactttcgtcaggatgtggtcgatgacgtcgtccgtggaaatgttttccgcttcagcctcataagagagcaggatgcggtggcgcaggatatcgtgggccaggtccttgatgtcctgtggagtgacgaaggaacgatggtgcatgaaggcattggcgcgggccgccagagccaggttgatggtagcgcggggagatgcccccgcgcggatgagaccgcgcaacttcacgtccaccgtttccgggaaacgggtggcgcgcaccagatccacgatgtagccgcgcacggcgtcgtcaatataaatctggtttaccaggtcgcgggaggccgccacctgttccggcgtggtgaccggggaggtttccggcggtttggcggagctggccatgaggtccagcacctggagttcttcttcgcgcgtggggtaggtgaccagcaccttgaagagaaaacggtcaagctgggcttccgggagctggtaggtgccctcctggtcaatcgggttctgcgtggcaagcaccaggaaggggtccggcaggcggtaggtggtttcacccagggttacctggcgttcctgcatggcttccagcagggcggattgcactttggccggggcgcggttgatttcatccgccaaaatgagattggcgaagatcgggccttttttggctgtgaactgcctttcttctggattatagatcattgtgcccagcaaatccgccggaagaagatccggcgtaaactggatgcgggcaaactgtgcatgcagcgtgcccgccatggcttttacggagagcgtcttggcaaggccgggcacgccttccagcaggacgtggcccttgcagaggagactgaggattaatctgtccacgagcgcctgctggccgatgaccaccttgccgacttccgttctgagagcagaaatccacgatgagttcgcggcgataatttcgttgaattctcgggtgtccatgattctgatagcgggtgagacagtatgccgggcacttacgttgaaaaaatcctattatttcccaagggcaaatccggttttcaacaggaggtcttcccggaaatggggagccatcatctgaaagcccacgggaagttccatgccgctttccctgacggttccgcagggaatggacatggcggggaggccggccaggttggcggggatcgtgtagatgtccgccagataggtctggaggtgatccagcgcggaatctccgattttgggagcgggagagggagaggtggggcctacgatgatatccgccctggaaaaggcttccgcgaaatctctggcgaccagggagcggactttttgagcgcgggagtagtaagcgtcatagtaaccggagctgagcacataggtgcccaggatgatgcggcgcttgacttccggcccgaatccctcttcacgggtgcgtgagaagagttccaccagtccggcggcgtcttccgccctctttccgtagcgcacgccgtcaaaccgggagaggttggaagacgcttccgcgcaggcgatgatgtagtaggcggcgacgacggcatccgcgtggggcaggttgacttccaccagctccgcgcccaggctttccagctgtttgacggtgttttgcacagcctcggaaatgcccggatggttgccggaggtaaagtattccgaagggatgcccactttcagccctttgacgtcacggcccagcgcagcttcaaagtccggcacggggcagtttgcggatgtggagtctttccggtcgtgtccggagatggcctggagcaggatggcggcgtctttcactgtccgggtcatggggccgatctggtccagggaagaggcaaaggctaccagtccgtagcgggaaacgcgcccgtaggtaggcttgaggcccacgataccgcagtgcccggccggttgccggatggagccgcccgtgtcggaaccgagtgcggcaacggcggtagcggatgcgacggcggcggcagagccgctggaggagccgccgggaatgcggtccggggcttccgggttgcgcgtgatgccgtaagcggagttttctccgctggcacccatggcgaattcatccatgttcgtgcggcccagcgggatgccgcccgcctctttcagcagacggatggaggtggcgtcataaggagcgacataaggggaaagaaggcgggaggcgcagcgcgtcggctggcccaggacattaatgttgtccttcacggcgatggggatgccggccaaggggctggaaatatccgctccggccgcggcgtggagggctgcttcgcggtcaaaggagatgtaggcgttggttgtccggtccgcctcaatggcgtccgccgtcaggttgaccagttcggcaggggagagttccttgcggcgcaggcggtcacgccactgggccagggtgccttgaatttttgacatgagaagggaagggtaaagacggttgaaaggtgaagggaaaaggaagcgggaggatcaggcggattccaccaccttgggcgtacggaattgcccctgggactgctggggggcattggaaagggcttcttcctgggtgaagccggtttcaggaatgtcttcgcgcatcacatccattgccgggagaggatggttcatgggggcgatgcccgtgacatcgtaggattccagcttggtgatataggccaggactttgtccagatccttggagaagagagctgtttcttcctccgtcaggtcaatgcgtgccagcttggcaatgtaggctacgtctatttggggcgtgctcatggtgtaatgtagaaaagatgcggaaaagaaagggggctgcctactgttgttccagcaggcggacgatccagcagaaggaaacggcgatggcgcaaatcagcaggcccagcagcatgaagttttctcgcagttcccgcctcatgttggtggcgcgtccgtcacgggccactacggcacgcagtgcccggttctggttgccctcccgaacgcggtcgggaggcggcatggtattgcggtccaggcgcatgcgggtctgctgggacgggcgtttgagagaggcttccaattcctggatacggctctcaatttcccgtgaggcgcgatccagttctgccagttcggaggaacggcgtttggtttttcttttaatcatgatgcggaagggctgaaaatccagatgaaaaagaggatgatgagggcaatcaggagcaggggaagatggaaggaaagaccctggaggaactgggtcatgaattcacgggagctgatgcgcactttgctggagcggcgcactccggtgagcactttggtatgctgcatgcgcgcgcactgctggacggcatccgcgaattcctcctcgcagcggtcaatgacctgctggccctggctgatgaggttgtccgtattttcaataggccattcatccgggcgtacggtgctgagcattttcaggctgcgcgtcagcgccatgtggatttgttccagttcattgctttcctggcggaggctttccacctcccggccgatgaggtctgcagcgttgaccatgcggtcgcccagctcattttgctggtccataaacctggctttgcgcatatggcattcttccaggcggcggcgggagttttccacttcctccttttccttccgcaattgttccagcctcagctgggcctgttccatatcggcgtccacctggtcgtctgcctgggaattgtaaccggggtcggcgtccatgcggcggtattgagggtgacttggtctcatatgcggaaaaaataatgcgggctggcgtaagggattacagcgtttcgacggcctttctacctgagcggggaatccctgcgcgtgctattatttaactttcacaaaataaatcaagccaagaagaagacagggaaagattttccggatgcgttcccggcagggaatgccgtcctgttttttcttccggagccgtgcgttccggatatccggggggcgacaggacgctccgctttcccgcaaaggagggggaggtgcgctttttttatggtcaagggcatggatttgctggtatgtaggaagcatgcagtctgacacggtagaatgtaagccgaccatgtggtttaccggcagggcggttatcatggctctcatgtttctggggttcggagtgtatttttattatgatgcttccatcggataccctcaaaaaaacctggagtttttcatgcacaaggcgttcgtggacgctggagccgtgtttgaccgtgaggtgagcgggaaaggagcgtccgcggaggactgggagcgcattgttctggcgcgcactgtggattttccggagggctacgaaattccttccggcgtgaatcggaacgcggtgccgtggcctgacattttggcggattacagtctgatgtccacccccggcaagggttggagcgctgcgtggcaatcttattccggggaaaagcactatcccatcaagccggtggaccacccgtatgacgcctccaaaatttttgaacagtgggtggccgggtgcatttgcctggcgcttgccatggtggctctgtttttcctggtgagaacgcgcggcaggaagatgtctctgaacgggaaagaggtgacggccgctggcgtggttttccgcgtggatgacattgcccgtctggatttgcgcagatggaaactgaagggactggccatagcgacgctgaaaccggaatgcggaggagcccgaatcaggctggacggcctgacttacggtggcttccggaaggaggattctccccataacgcggaagatttcatgaaggctcttctgtctctctacagaggagaaatagtggattatgaagaaattcctgatggcggcgggccgcctgcccggcaggaggacgaggaacgtgccgtatgagcgaatcccttccaccggaaaagggcgccaatgaccgtgcgttcggcgtcgcctgctggacgctgggtgggctggcgtttgttctgttgctgatggtgggcgtttctttcagcctgtctgtccgtaccgtggtggtggaaaaagtggtggagaagcctgttcccgttccggcacgggagaagccggagcgttcggccggagtcgttgaggatggggcggctgaggagaccgtgcatatggcggatgttccggcatccccttctgaaaagccccgttccgtggaagaaatgctccgggaagccgatttgtcagatccggctgccgattctgtaccggtggccgcggccgttgcgggagggggggattccgctagcggggcatcctttcctgctgaggatccggacgaggtcatgccccccatgacggaggaagtggcggagcttgtcaaggcggctcgttacgcccagattgaaggtgacctcaaagtagcggtcgtgaagctggagcaggccatgaggctggaaccggataatccggtggtgctttattattatggacttacctatgaatggctgaggaatgcggataagtcacgggagttttttctgaaagtatatacccagcgtgagaaggcggggaaatattttgcgcgtgcggcgcggcaccttcaggccggcttttccagcccggcggatttgcggggggatatgtccttcggcactattctggaataccgggatccggaatgccccgccggggagcgcgtcaagctgatggttcctattctgatgaaggatggactaaatgtcaggccggaggatctgcgcgtcattgtccagttttttgacaaagtcaatgggaagaaagtggaaaagacgcacgcacccgaaccttcttcccggtgcgttacggaacccgcggattgggcggacggtgaggaaatcatggaaataacctactacatgcctcccctgacggaagaagagacgattgcttatggaagcctgaaatattacggatataccgctaaattgtattacaagggggaaccgatggattgccatgcttcccctcccgtgctatttttactggaacagatgaaccagagttccccttccggactgcccgagatttatgacggcggtttgcttccccctgtagaggcggctccggtttctgagtcttatgaatcccttttgcctccctgatgcctgatttgcccaatgtttgatcttccccacaactttggcgattacacgctggtggcatttattggccgcacgcgcggaggaattctttatcaggccatccagcagggcatggaccgttccgtgtttctggagttgctggatccggacaatccggagggggtgggcgtggaggattttctgatgaaggcccgcacgcgcgccgccattaatgctccggtgctgggcaccgtctatgaagcgtcccaggcccagggatactggttcgtcaccagcgaacagctgggaggctcatccctccagtccatgctggaccgcgggcagaccctgtccatgaaggatttgctgaaggtgattgaaacggtcggcaacgtgtgcggcaggtatgagcgtctgcggaccgctttcaatatcatggagccgcgtcacattttcctggatgacaagtctgccgtgcggctgatgaatacggccgtgcccggtgactttcacgaagaaacatcccgcgaccagatgaagcgcctgggcatcgacctgcctcctctggtgactccggatgtgcccggaaccacgcggatgcgcaccctgctggaatggatgagagaagggcagaacggaaagccgatgcaatgggaccaggttatggagctggttgctgcggtccgcgaacagctggggctttcccctcgggttaccacccaccgctataccgtccccgtggaatcccgcagaaaagccggaaaaaagctgctttgggccggaatgggcctgctgggcgtggggatagccgcggctgccgttcttcttttattcccccgggagaaggaaaccgtatcccgtccccatgttccggctcctaaacattatccggatttttcctccagcgatcatacggaagtccgcgtaactcttcccggaggaggggaactgattgtgggagcccatgaaattaccctggaatcctaccgcctgtttttggaccagtgggcacgcctcactccggagctgagggaggaatattcccacccggaccagccggacaagaggactgcctcccatattccccaggactgggaggctatgtggaaggcggcttccacgccgggaggcaaatggaaaggcaggaaaataacaccccgctctcccgtcgtcaacgtcactttctgggatgcctgggcgtatgcgagctggaagcccgtggcccccggagaaccgcgctaccgcctgcccgagcgcggggagtggatggctctggggaatatgctggaaacgggtgagaagggggacaggacgctggtgattgacagatacagcaatgatcatgatttaaagaccggcgtgtgcggcatggcttccggcgtgatggaatggacttcttccatggaaaaggatcctgcgcgcgtgaaggagcctccggggccggtgacctgcggcggagactggaggcagcccggcatctccaatcgggtggaatacctgcgctcccgcggtgaaagccgggacaacctgggattcagaatcgtgcggaatgtccgctgacccgtttaacgacaatacttaacatatcaataccatgaaacatatccttgcaatgctgctggcccttctgggggcgtccggggccctggcccagatttacgtgaaagtagtcccggaaaagaagacgttcctcagcggggaagccatgtacatgaggctgaccattaccaacaattccggcgtgccggtggagctgaaaagccgggaatattcctcctggctggatatccatgtggagcattccactgcgggggcggaactcccccagtccaaatttgccctgtttccgcctctcaaggttcctgcaagcatgagcgtttcccgcaagattgacttgcgccatttctatgacttgtcccgtgagggcaactaccatgtgcaggccgttgtaaaaatgcccaaccagaaggacatgtttgcttcccagaaatccctgtttgccgtccggacgggaacacccatgtggtcccagaccgtggccattccggccagtgccaagcggtgcactttttccatttgcactattgccgtgcggggaatccagaaattgtatgtgcagacgaaggatccggatacgggagtggcctacaatgccgtgtgcatcggtgactggctggggaccacgcgtccgcagtgcatggtggacggcaaggcgaatgtccatgtcttcttccccactacccccatgctgagcgcgtattcccgcatcaactaccggggaaccatggaaaagctgcagtactataaaaaggtggtgggagccccctccatggtctttcttccggacggaagcgtacgtgtgacgggagccgtccattatgatcctaccgtgaaacccaagacggtgccggatgccgctgatgttcccggcatgtaaatccgtcctgtttcgccggatgtcacgcaggggaaaaggaaaggaaaacgtactgcttcttccgtaccgggaaaataagatattccggtattttcctgagctattttcccggctggggagtgtttttcaagatgttttgcacgcttttctgcacaacgctgatgggcagggcgtaattttccgcccggttcactctggcgatgttcatgccgatgagttcccccttgagattaagcagcgggccacccatcagcgtgtaccgggaaggggtgtcatgctggaggaccatagggaaatcatccctgcgtttgctgaacccaccgctgatcaggtcattggaatcctcaggagcgtttcctcccagggcctggcgtctggaacccagcgtgatggtgtaggataaccttttatccttgcgtttgactttcagtgtcactctttctccaacttttttcctggacagaatgggggaaacggcatccagagcagtaacgggcgtgccgtccaccgccagaatctcatctccggcctgggctccggcctgggcggcggggccgtccttggtaacttcctgaatggtacagggggtgccgaaaacgacgcccaggtaggcggtgtctccgttcgggatggggcgctgctctgcactaagggttcccagctggggccgtctggacgtacgggtagtggagccgttgctgactaccagggttcccatggcggcatcattgctgacagggccgggagcgtgcagcccggcggcttccactttcactactgcgatgtctgtggacgggtccgagccaatttccctgaactgcccatatttggaagaacctacccggatggtcagatccctgtaagaatggagttccgaggctttggtggcgatgtagccgtccgggctcagcacaatgccgtaaatcacaacatcgtgaccggaaaagaaaactgcgctcaagtcctgaagacgttcgcggatgggctcgatagttttcagaatggctttcccgttgattctctgttcaaaatccaggcttccgttatttccttccgccagagcggggtggaacagggcgaaaaccaggggagacaggcagacgcagaaaggaaatttcatgatggctgagtggagaatggctggctgtcctgttccggtggcggcgtcagggaggtctttccttccgctgtctcctccgtcagagcgtcgaaatctttcatgggcacgtgcagattgtcttccagaccggaaccgaccctgctgtgaatgccaatcagctttccatccaggttgaaaagagggccgccggaatccccgcgaatcaacttgcagtccgtctgaatgacgccgttcttgagggaaaccaccctccccaggcgcaccatcgggccgcgtttccggtccagccccccgccgtgccccagcgcgaacacccagtcccccacacgaggcattttttccgctttttccacgcagggcagttttttgttcaattgggatgtgattttggccatgcctgcgtccgaattgctgttttgcgccgtggtttttcccggaaggcgcgttccatccggcaggatgattttgagcgtggttcctttcttgtccacaacgtgggccgctgaaaagaccaggcctttttccgaaaccaggatgccggagccgctgccgttgtttaattcaatgcagaccagggcgggaagcacccggggaagcatttgctgaagctggcgttcaatccgttgcaaatcttctacggattgcggggtggaagccagaagaccggctccatcagcggactgagctaacactggcggggccagcagcgccgtgccgcagagaatagcggaaaaacagggattccggagagccggggtcatgattgccggtgattattgcccagagacggaagtttccgtcttctgctgctggtcctcctgtccgccgcccaccagggaatcgtggtaatacacgccgataaacaggcctgccagcgtaataagggtgatgaggagctctttcatgccgtcacagcatagaatgtgtattcgcgtctgacgagagaatttcattgataagccgcattttgatgcagttcggcagagcggggatgaatgcggatgagaaaatagccaaaataaaggttgctttttcccgtgataggcgtataaatccctcagcggccgtttccggttcgctggctcatttcaagcggatgtagctcaggggtagagcgcaaccttgccaaggttgatgtcgtgggttcgaatcccatcatccgctccatttttaagaatcccggccggtttgatgcgggaataatgagtttgcctgaacagtgatatttccgtttaattatttgaaggtgcggaaggaggatatggcggtcgtttatttctgcagaggtgaaacaagagccggatatcttgtttgcagcggggccttatgcgctgccccgcctttgttgatctcctccggaaggagaggaattattgcggaagtccgctttcctgaatgacgggagtttcccttggaaggacttttctttttaaaaacagagctgtcaaatatttacggaccggttcatcatagagtttcaggcagagccaggccagcagaatgcttccaatgacgacggccagggttccgggaagtgagtccaggaaggaaagcttttcgtttttcacccacgcatagtacaagtagatgaacgggtaatgcaccatgtacagggggtaggagatgttgcccaggaaacggcatattttatccgtatagggatttgtaattttgccggaagcgccaaagatgaggatgagcgggaaaaatactgcgaagcacgctgtttcatagaggctgttcatccagaaagcattttgtcctcccagccggggaacggccagcagaatggcaagggacagactgcataaccagaaagaatttttgacgttgaacggcttgaatagccggaacaggagcagcccggctgaaaaggagtacaacaggcgcagggagccgcccgtccattccgtgccggtcatggagaatccggagcatatgtctccgttaggcccccagaagctgaaggaggcaaggccgcacccggccgagacaaccagtattgccagggagcgtgtagagagtttccggatgaagagggcataaagaaggttgccgatgtattcaaagaacagggaccagctcgggccgttgagcgggtacatttctcccagaccccggatttccatgccgggaggagacggaatgagcagaatattaacgaaggtagcggcgaacagggagatgaccgctacctgcgatacatcccatacggggcagccctggaaatagaagataagcgcgccgatgagcgcccctatcgctaccatgggctgcaggcgtataaggcggcgtttgatgaattccccggtcgtcatcgttttccagcggttgtcataggcgtagccgatgacaaagccggaaagcatgaagaaaaaatcgacggccaggtagccgtggttgatgatttggtccacatggctggtggcgtaggcttcaaagatgtggaaccatacgacgacaatggcggctacgccgcgcaaaccgtcaagtatgtggtagtggtgtttttcactgcctgggggaatgggagaatgctgcgttttcaacatgagagaagctgttgtccgatgctgtttttgttttaatgtgaaaaaacggctgcccattttccgcctttccggtagatgcaggttctccggaggcgcagttgttgagctgcctaagcaaatacccttcttcccggcagattctttcaacaggcgtttcctgtcttatccctcagcagggcgatgagcggaacgaacggcggttttccggagggaagaatcgcttatggctcggaaggtgcaggcaaccgggaaacccgtcaggatggaaccgtttttgtaagtctgccgggaagaacagggtgttgcttgctgtccgtccgatttccggagacaggagtttcctgcccgcttttctgcgctgcggcgttttttccggaatgggagaagggctaggcaggggcgaatgctcagcctttgcggtagtttacaagggtttccatatatattccggagatactgccgccgtccatgggggttatgtccttgaatgcggggttgatgggctgcagcacgtattccgtttttcctgtttccgcgtttttcctgcgaatcagttttttcagcgtaacgccgcgtccgtcgttgtattccacgatggttcccggtttggggatgggcggggcggtatggcgccgcataattaccagggagccgtccgggatgaggggttccatggatttcccttctacgcggaccacgtattcgtttttacccaggggcctttccatgtaaatggtagacgggacggtgtcgctttccgcaagagagcctgcggcgatgttgccgattatttgcgtactgtattcacgcctggcgtgtccagcatgggacgggaattgtctgaccaggggaaccaggggggagtgcattggccgcagctggcgttcctccgccgcttcgtctgccaaatccgtcagccactggcggagggggacgcctttttcagaggcggcccgttcatatttcctcatgcgctcttccgtgatttccagcacgaggcgattggtctggacaggttcgtcttccggtcgaactgttttgtattgagacatcagggattggattttcaacatggcgctggcggggaaggggccggagggggagagccagttattcaccgtacctttttccgtaccgcattccatggcaagccagtcacggtttttcccaatggccttcaaccagtgtttcacatccccttttgtcggtgtcatggcttgatgatacacgattttcgtgaattgtcgatagaaagaaataaattgaattcgttaaaatgtgttgacttattaacgaaaatcgttaaaaaagcgctatgaagtacatgcctttagacctttccgtaatgcagccggagccgtttccgcatcccgtgatgatgaggtccgacctgtatcccagaagacagccctcccgggaagaaaagtggggcatttgccccggttccgtctgcggcgcgctgcgggcgctggttcgtcgatgcagggaagaggcggagcggcggaagctggcaatgaacattctttccgtcgccggagcctgcgttttcggactgatggccgtcggcgtgttctggctggctgttgagatggataattccgctttgcaggcttccaagtcttcctgttccataaaaccgtaagcaggcccttgtccaaaggggagggcggaacgcttttttcctgcggagcttgctttcggaaatgaacggccgcgtttgatgcctcccggtttgttttttccggttgaaacgcctgcggacgcatgaaaggttccggcaggaatgggtgccggatttccagaggggcttttttatccgcagagcaatttgaacgggagagacggggaagggctggagcttggatgattgcattatttgctggctgcatcacccgggttccggaaatgccgtccgccaatgccgttcctgtgcgggaatagcggttggtcttgcaggcgggcagtatggcgcccgtttgcgaagaggatgaagctgcggttccggatttctgtccagagggaaccgcatgagatggagcagggatgcttttcctccacgtggccgtttcccgtttatctggcgcggtttgatttcattctggcgtggccgccgggaccggctgttgaaggagtttcctgaggcgcaagcgggcacaggcctgtatggaaatcccctgtggtgtctgtcgtgccgggatgcgaggcggggatgatgcgacccgggtccggggcgcccattattccgggcgttatggcgctggtcgggagactggcggcggaagatgccgccaggaacggcggccttccgcttctggattcattccgggtaaaagatgcgccttttgcggagaaagtgaaaaatgaagaggctttttccgattttgcatgttgagaaataattttatgacagttgatatgtattcattataaatgaattaaaaataatgaagcagaaagtgctaaaaattttttgcattatagttactataaggaatagcctgaatgaagaaagaagaaggcatggtacgcggtaagcgtcctttcccttctttttccggaatccggccatcgccgtttaaaaggcacaccatgaaaaacaacagactttttatcaaatcatcgccatgaccaagagaatgattaaaaatgcttcctacgaaggggaacgtcccctgttcgcttcccgccatcttaggctggaagacgtcattatttatccgggggaatccgccctgaaggaatgttccgacattgaagctgtgcggtgcgagttccgggggaagtaccctttctggcacaatgacggactgctggtggaacattgcctgttcagggaaggcgcccgggccgccatctggtattcccggaatctgcacatgaaggatacccgcgtggaagcgcccaagatgttccgtgacatggacgggatggttctggagaacgtcgttctgacggatgctctggaatgctgctggcactgccggaatgcgaagcttcgcggcgtgcaggcggagcatggggattacctgttcatgcacggggagaatatagatgttgacggcttccgcctgaacggaaattactctttccaatattgcaggaatgtggtgatacggaatgcggaaatccattccaaggacgctttctggaatacggaggacgtgacggtgtacgattccgtggtggacggggaatacctgggctggcattccaggaaccttcgtctggtgaattgccgcatttccggcacgcaggcgttgtgctacgcggaaaacctggttctggagaattgcacgctcggagaggatgcggatctctgctttgagtattcctccgtgcatgcggaaatcaaggggcgtgtgcacagcgtcaaaaatccgcgcagcggccgcattgttgcggaagagtacggggatattattctggacgagcattgcaaggctcctgccaattgctccattgaaacgggaaaagcccaatccggagaagccgcatgaagtacgattttgatactgttgttccgcgccgcggcacgaattcctacaagtgggattccatgccccgggaggatattctgcccatgtgggtggcagacatggatttccgtacggctccggcggtgacggacgccatccggaagagggccgggcacggcattttcggttatacacgggttccggattcctattatgaggcggttacaaactggtttgaacgccgccacggctggaagattaatccggaatgggtgatttataccacgggggtggttcccgcgctgtctgccgtcatacgggccctgacggtccctggggacaaggttctggtgcagacgcctgtatataattgctttttttcctccatccgcaataacggatgcgtggcggaaacctgccctctgaaatatgagaacggcagatatgcgctggatgcggaggagctggaacggaaagcctccgatcccgccgtcaagctgatgctcctgtgcaatccccataatccagccgggcgcgtctggacgagggaagaattggaggagatggccgccatttgccggagaaacggcgttttcgtagtggctgacgagattcattgcgaactgacgtatccgggccatccctatacgccgttcgcctccctctccgaggacgccctgcaccattccgtcacctgtatttcccccagcaaggcgtttaatctggcgggcattcagatagccaatatcgtcgcggcggatgaagaagtccggaagaggattgacaaggccatcaacatcaatgaggtgtgtgacgtcaattcttttgctgtagatgccctggaagcggcttataacggaggggaggactggttggaggaactgaagctctacctttacgggaattacgagattgtccgggatatgctggcagaacgtctgccgcagctccgtgtggtgccgctggaggggacgtacctggtctggatagattgttccgctctggggcttccctccgcagagattgtccgcctgctggaagaggaggggcgggtgctcgtcaacggcggggaaatgtacggggaagcggcggggtgcttcattcgtctgaacgtcgcctgtcccaggaagctgctgcttgaggggctggaaagaatcatccgcacgttgtgcggcctcatttccggaacacggacgtgcccgtcgggccctgcaggctcttaacagggagaacggttattaatcatcaacaatcaagttgccatggaaaataggatgacgagaagaacatggctccagtcttccaccgcagccctggcatgcctggctttgccggagtatgccttgggcgcggttgcggagaagggtggagcttccagggtctggatgacgaaagaaatttctccggaggctctcgtgaggatttacgaggctctggggcgtccggccgggggaaaggtagctgtcaagatcagcaccggggaaccgggaggccgcaattttctgagtccggccttaattaaagacctggtgcgccgggtgaacggcaccatcgtggaatgcaatacggcttacggaggcaaacgctcccggacggaggaccatttgcagactgcgaaggatcacggtttttccgatattgcgcgggtggatatcatggatgcggaaggggagttcactatcccggtgagggacaggaagcacctggaatacgatatcgtgggggatcatttaaagaattatgatttcatggtcaatctggcccatttcaaagggcatgccatgggcggcttcggcggtgtgatcaagaaccagtccatcggtgttgcctcggcatccgggaaggcgtacatccattccgccggaaagacgcgggatgtttcctccgtgtggaacaatctggccagtcaggatgatttcctggagtccatggcggcttccgcgcaggcggtggcggattacttcggggacagaattttgtacatcaatgtgatgaataatctgtccattgactgtgattgcgattcccacccccatgcgccggaaatgaaggacatcggtattctggcctcccttgatccggttgctcttgaccaggcctgcctggatctcgtttacgccgtcaggccgtccgaagggaatgacaacaggcccctggtggagcgtattgaaagccgccatgggcggcatacggtagagtatgccgagaagataggtcttggcagcaggaagtatgaactgaaagagctgaaaccgcagcaggccgtttagtcggttatttcctttttagtatcaaaaacaatagaaaaaactgtgatggaaaaagtgatgttgaacaatggcgttacgatgcctgtcttgggatttggcgtttttcagattctggacgctaaggagtgcgaacgctgcgtgctggatgcgattgaggtcggctaccgttctattgataccgcgcagatttacggcaatgaggaagccgtaggccgcgcagcggagaagagcggggttccgcgggaagagttgttccttaccacgaaggtgtggatttccaacggcgggtatgagaaggcgaaggcgtccattgacgaatccctgcgcaagctgcgcacggattatctggatctgctgctcatccaccagcctttcaacgattactacggcacttaccgggccatggaagaagcgaaccgggccggaaaggtccgcgccattggcgtgagcaatttttatccggaccgttttgtggacctggcggagttctgcgagatcagacccgccgtcaaccaggtggaaacgcatgtgttccaccagcaggaaaaagtccgggaggtgatggaaaagtacggtaccagaatggaatcctgggggccttttgcggaaggtcgcaatgggtttttctccaaccccgtgttgaagggcattggagagaaatacggcaagaccccggcgcaaacagccctgaggttcctgattcagcgtggaattatcgccattccgaagacgacccaccgggaaaggatggaggagaatttcaacgtctttgattttgccctttcccaggaggatatgggcgctatcgccaggctggaccgcggagagagccttttcctgtgccaccgggatccggaatcggtcctgtacttgatcaattacgggaagcagtaattcgcatgaagttccagaaagatgatacgttactcatttaaaatattttgtttggctttttccgcctgcttttgctgtgcggggagcctgttggcagaagataataacccccatacggacaagatggtgaacgagaagctgaatttaacgcaggaatgggacaaagtgtttcctaaaagcgacaaggtaacccaccgcaaggtaagtttccgcaaccgttatggcattatgctggctgcggatttgtatatgccccggaatgttaacgggaaattgccggctattgccgtttccggccctttcggagctgtaaaggaacaatctgcgggcctttatgcccagacgatggccgaacgaggttttctgacgatcgcgtttgatccctcgtatacgggagaaagcggaggatttccccgctatgtcgcgtctccggatatcaatacggaggatttctgcgccgccgtcgattacctttccacccgcgatgacgtggattcggaacgtattggaatcattggcatttgcggctggggcggcatggcggtcaatgcggcggctatcgacacccgcatcaaggcaacggtaacctccacgatgtacgatatgagccgcgtgaacgcgaacggctatttcgacgcgatggatgccgacgcccgttatgagcttcgcaaacaactgaatgcccagcggacggctgatgcgaagagcggttcttatgccctcgcggggggcgtgcctgatcctctgcctgcggatgcccccggatttgtgaaggattattacgattattataagacgccccgcggctatcacaggcgttcgctcaattcaaatggcggatggaatgtcacttcggcgctttccttcatcaatatgcccctgctggcgtacagcggtgaaatccgtagcgccgtgctcatgattcacggggaaaaagcccattcgcgctatttcagcgaagacgccttcaggaagttgaagggggacaacaaggagctgatgattattcccggtgcaagccatgtggatctttatgacaatcaagccggtgtcattcctttcgacagaatcggacagttctttctggagcatctgaaataaggaggccccgcatctgaatttgggaaagaaagacggaacgtaatgaaacgcaaggattttttgaagataacatccggtttggccttatccctggtttcccggggatgggccggggtgggttcttctttgctgtctgacggtccggggtcttcttccggggtgccgaagaagggttttcttggggaatcccggcgccttggaggcctggaagtttcccctatcgggctgggatgcctgccgatggtgggttattacggcggcaagtatgataaacaggagatgattgccctgatacgccgggcttttgacaaaggagttactttttttgatacggcggaagtgtacgggccttataccagtgaggaatgggtgggggaggctctcgcccctgtccgcaaccaggtcaggataggaaccaaattcggttttggcgtggaggaaggccgtccttcttccctgaacagcaggcccgaccatatccggcgtgcggtagaaggttccctcaggcgtttgcgtaccgaccacattgacctgctttaccagcaccgggtggacccggatgttccgatggaggaggtggcaggtacggtgaaggaactgatgcaggagggaaaagtgctgcatttcggcctgtccgaagcttgcgcccgttccatcaggagggctcatgccgagtgtccggtgagcgccgtccagagcgaatacgctatctggtggagggaaccggagacgaagatttttcccacgttggaagagttgggcatcggttttgttccgtattgtccgctggggcgcgcctttctggcaggagccgtccgggaggacagccgttttcaaaagcgggaccgccgcgccactttgccccggtttactccggaagccctcagattcaacatgccgctggctgttcttgtccgggaatgggcggaacgcaggggcatgactccggcccagttcgccctgtcctggatgctttcccggaaaccgtggattgcgcctgttcccggaacaaccaatccagcccatctggatgattttctgggaggggcttccgtccgcttgtccgaaccggaactcaaggaattcgaccttgcctgttccagaattcccctgatggggcaccgggcggatccgtttacggagagccagattgacaagtagttttgccggcgcgtttccttccgctccggaaaaatgccgcgggactgtttgcggcggaaggatgttaagctatttttaagaaagagacatatgattctgattttcggagcattgctggcggtttacgttttttgccgcgctattttgccgctgaagctgaaatggggctggaagcttctgcttgccgccctgctggcggtggcggcattcaaattccacttgctgcatttgtttggaggccccatgtttttctccccggttttgccggaaaacgttctgctggcggccgcgtggctgttctccgttcttttcctgttctttttcctgctgctggcggcagatgtggtgcgggctctgtatctgctggttttgttctgcttgcggaggaacaggacggaaaggttccgcatcattggcaaccgggttaatgttgctttgctggttttttccgccgtgctggcaactgtgggcatgattggaggcaccagagtgccccaggtgaaggaggaaacggttgccgtgaaccgcctgccggaggaggcggacggattgacggtcgccgtgctggcggatctgcatgtggacggcattacaagggaggagcgcattcggaagattgtggagcgcacgaacgccctgaatccggacatcgtcgtgattgccggagatttcgtggacgggacggtgcccgtgcatggcggcgatttgaggccgcttgcggatttgaaggccagatacggggtgttcggcgtgccgggcaatcatgagtattactccggttatgaggagtggatggagttcctgcccactctgggcattcgtatgcttcttaatgaacacgcgccggcgggaggggaggccgtggtattggccggtgtgacggatcctgtggctggcatcatggggaaggaggagccggatataagcaaggcgttgaaggatgccccggaaaagggagtgcgcatccttgtttcccaccagccgcggctggcccgggaagcggctgcgcacggcgtggatcttcaagtgtccggccatacgcacggaggcatgattgccggcgtggaccggctggtggcgcgttttaacgagggattcgtctccgggctgtacacggtgggtaatatgaagctgtacgtttccaatggggcggggatttggaacggctttcccatccgcatcggcgttccatcggaaattgttctgattcggcttcggaaagaataacatatattgataaagcagtttaggaagtgatgcgggcaggattgccggaattgttgaaaaaatattgacttatagttactctaatgtttagacagaaataaggaacaaggtcaggcaagggaaatgccggatgaaaccgttttttccggacgccttttgcctctccttttaaccggataaaaatacatgaaaacaatatcaatgatatgcacgctggccgcggccctgatgacaggagccggatgtttgggacaggaacaacccaaggtttccgcggaaccttccagggtcctcattgcctattattcatggggaggcaatacgaagtacgccgctgcgcaaattcagagggcgacgggaggaacgctgtttgaaatcaagccggtcaagccttatccctccgaataccgggaatgcaccgtgcaggccaggaaggagattcaggaaggggttcggccggaactggccgccaaagtagaggatatgggcaagtatgatgtgattttcatcggcagccccaactggtggagcaccattgcgcctccggtcgcgtctttcctggcaagttacgacctttccggcaagacggtgattccatttgtgacgcatggaggcggcggcatggcgcgctgtgcggacgaggttcggaagctgtgtcccaagtccaccgttctcaagggaggcgcttttgccggggaaggaatccggacgacgagggccgcgcttgtcaagtgggtcaatgagacgatttccatcaataaataatgattttatgaaacgaaccatcgcgggaatggctttttcccttgcctggctgatgaacctttcagaagcccaaaccataaatcacgataaagcggaaatggagaatggcaaaaatacgggcatgtgcgtcaagttaccgatgcagcctgatggtatcgtccgtctctcaaaaatagaagtgcatgctgaatatttggaggaatatgtgaaatgcgccatcgaagtgggggaaatctccctgcgcacggaaccgggcgtgttgaccatgtacgctgttgctgaaaaggacaatgcttgcagaattacgattcttgaaacttacgccagccaaaaggcatataagtcgcacatcgcatcggctcattttcagaaatacaagcaggaaacgttgcacatggttaaggcattggttttatccgaccagacgccgctgaatcctctaaacagtattactaatattattaaataatacaataatgaataagattattttatttctttcaattagttttttcataacaaatgctatggcgcaggaaaagatagtacagacggcgggacgcactcagttaggagagtttgctcccaaatttgcggaacttaacgatgatgtccttttcggtgaagtatggagccggactgacaagctcggtctgcgtgatcgcagtttggtaaccatcacctccctcattagtcagggcatcaccgacaattcgctcgttttccatcttcagtcggcaaagaagaatggagttacccgtaccgagattgcagaaatcatcacccacatcggtttttatgccggttggccgaaagcatgggcggcatttaatctggccaaagacgtatgggcggaagatacggctggcgaagacgccaaagccgctttccaacgcgagatgattttccctttaggcgagccgaatacggcatatgccaagtatttcacaggcaacagctatcttgcacctgtttcacgcgaacaggtgaatatctccaatgtaacttttgaaccccgttgccgcaataactggcatattcacaaagcgacaaaaggcggcgggcagatgcttatcggtgtggccggacgcggctggtatcaggaagaaggaaagcctgctgtggaaattcttcctggcacagttatccatattcccgccaacgtgaagcactggcacggggctgcctccgacagctggttctcccacttggctattgaggttcccggtgagaatgcatccaatgaatggctcgagccggtgacggatgaggagtatgccaaggccgtgaaataatgtggatacttccatgtgaaacaattacagcgcaagctgtcgtactggtgctgtaattgtttgatacaaaattattttgagtattccgcggcgccgttgctttcattcgcaatataataggatttgccggaggcgcccatgtattcgggaatagtctcgcatagcacaggttaagacccgtattcgacgaaataatatgaaaaatatattgattatcagcggccatacaaaccttgccgcatctgtagccaataagacaatccttgaaaccttgaacgaacggctgccggaagctgaaatcgtaaagcttgacgaactttatcccgattttaagatcgacgtggaagccgaacaacagaaattgctgcgggcagacatcattgtattgcaattccctctcttctggtactccgcaccctccatattggaacgctggatggaggaaaccttccgccacggcttttcacacggcagtaccggagacaagctcaagggcaagaaactcattctctctttcacaacgggagcacccgaaacgctgtatagccgtgaaggggccatgggatacgcgatcgatgaatttctgccatgctacaaggctgtctgccgactgactcaaatggaatactgcggcagtgtttatacctgcggcataagttacggcaatcgtacgacaccggaacttatcgagcagcaaaagggagcatcggtggaacacgctgaacgtcttatccggttacttgaagcgctctgatgtttgaataatttcgacgctatggccttcaattgctctctatccgatgactgcatgaatttcatgtatgcggaggcggcaggaagcaaataagaacacagagcggccgggattcctcattggaaatcccggccgacgtctgttgaggatttaagggagggtttattcctcaggcgcgatgttcggctcgctggcgctgatgtagttcagcggattgcagctgtccggcctgcggttgtctaaaagatcctgataaaattttttcttgtatttcaacacttccatttgttttttcaggattcggagctgttcccggagacttttctcttgcttgaagatcagttcggcgcgctccggaatggtggaatccccttcctggcacaggtcgatgtagtgcttgacgccttcaatcgggaggcccgtcatccggaggcagtggaccaggcggagccaccccagggtgtagtcggaaaacatacgggcattccctccgctgcggtccacgtccgggattaatccggcgttttcgtaataccggatggtgtaggctgacatttccatcatttccgcaacctgcttgacagtgtatctgggggtgcggtcataagaagggcggtaggtgccggatggatttttctgtttaatcatcgtgtgactgatagcttacagttactccaatatacgaggcgttgccggatgacaagttttttactgtgcttcacgggaataacgtatttaaaggccagggaaaacggcggtaactccattccgtggaggaaggaccgggctgtgcgtcggaatatcgggggaaggggggcaaatgagttgactggcttttcctccccgttacaatgaagcccgctccggggacggagcctgtaatgatgattattgcctccctttccgattccgcccgttacgaaatgttgaatcccctgttcaggagagctttcgattttatcagggagattgctccggcaaccctggaaaccggccgccatgtcctggaggaagatgcgctgaccgtgatggtgaatgaaccggtgatgaagaagcgggagaacgcccgcatggaagtgcatgaccggtttattgacattcacgtgcccctttcccgggaagagggattcatgtggaaagagcgcgcggcgctggaaaagccttccgaaccgttcaacagggaaaaggacgcgcagcattatgatgatgctccggacacctcttttgtcgtgaaaccggggcagttcgccatttttttcccggaggatgcgcatgccggctgcattggggaaggaaagcttctgaaactggtgattaaagtcagaacggcctgaacctcattccggaaaaacagtccggaatggagaacaggccgtttcttcaatttgcgggcgggagttgcgttattttccgtcttccttccgggcgtcctgtaaagcgttttccggaatccatacggccacattgccgccgtggacaagaaaccggccgttgccttccccgtcaatggagacggtttcctccacgttgccggtggcttccttccaagtttcccctgcgtgctgcttgcccacgttcatgactttgtctccatcctctccattggaaatgagcacagccacgccggaatgcgggtgctcttcatctcccacacgggtgaagccgatggtgttcgggtggtcaaagtagtaattttgttccccgaaagcatggtttttacggatttccagcagattgtcgatgatggcgcggtgcatgggcgggttgccgctcacaccgtaatagtccccgtagaagatgcagggataaccttccttcatgagcaggatgagcgcataggcggagggcttgaaccagtcttccacagctgattccagggaactgccccactgggaatcatggttgtccacaaaggtaacggccagcgtagggtggttctgaaccagggttccgtccagaattttggaaaggtcgtaatcgcggccctgcttggaggcctggtacatgttgtagtgcagggggacgtcaaacaggtccactttgtagcgttcctccttgaggtaatcgtccagggattccagatcctgtttccagtattcacccacggcgtagaagtctgctcccctttccttgcggacggctgccaggaatttcctgatgaattcgtcattgatatgcttgatggcgtccagcctcatgccgtccagatccagttcccgggatacccatattccccatctttccatttctttcaccacttccgggtggttgaagtccagattggcgaacataaggtagtcgtagttgccgttttcttcatccacgccttcgctccagcttttgccgtctcccataatcttgaaaatggaagttttttccgtgcgtgcgtcatagtccgttccggtgaagtggtaccagtgccatttgaagtcggaatatttgtttccgcggccgggaaagttgaagccggtccagccttcaatctcgtaggcatccgtaatttccttgtcgcggttctgctggtccacttccttggccatgaatttttccgtatagtccgcccctgctttgtggttcatgacggcatccagataaacgcttacatggtgtttgtgaagagccttgatggcctcttggagttcctgcctagtgccgtatttggtgcggacggtgtttttctggtcgaattcccccaggtcaaaaagatcataggtgccgtatcctacgtcattttgttccttccctttgtaggctggaggaatccagacggccgtaacacccatttcctccaggtggggggcgtcttccttcaacttgttccaaaactgtccgtcgttgggcagattccactcaaaatactgcatcatgattccgtttttcatttgatctgattccttgtcataccgttcgggttgtcgtgcttccaggggctgtccggtggaaaaagcggttttcccgggcgaggttctggatgatgaatccatacgaagcccccaacagaatagagtcctgaaagtacggcgcgttaggcatactgccggtcttatgtcctgcaaaaatgccagcggcaaaacggtaggtgggaagggtttttctccgaaggatgggaaaaagcggtttcactcccccctgccgcaccccggaaagaatgggccgggaacgagggttcgtgtaagtaagacaggtgggaagaaagattatgcctttcccgtgccgggaaccaggtagtgcctgtttttcagccggtagtatttcaggaaccggcggatgaagagcagggtgacgataaaggaaagcacgtctgccagaggaagggatgcccagactccgtcctgtccccagaaacggggcaggaccagcaggaacggcaggaggaagagcatctggcgcgtcagggacaggaagattgccagacgggcttttccaatggcctggaagaagttcccgatgatgatctggctgccgatgagcggaaaggccagcacgcagatgatcagaccgttggccgccaggctgatgagcgaggcgtcatccgtgaagagcccggcaatgccgcggggaaagaagacgcaggccaggaatcccagcgtggtgaaggatgtccctgccagaactccgtatttgagggtgagcagaacgcggcccggcttcatggctccgtggttgtagccgatgatgggctgcattccctgagtgaggccgatgacgagcatggcgaacaggataagaatgcggttgatgatgccgtaggccccgatggccaggtcccccccgtgatccgcaagctgcctgttgatggcgacggtgaccgcgctgccgcagacgtttaccaggcagggagccatcccgatggacaggatgccggtgacgatggtcttgcgcagctgccagatgccgcggcggaagtggaccgtgctggccgcatcggaaaagtgtaacagcacgcgcaccatgccgacgacctgggcgagaagggtggccacggctgctccggtaatgccccatttgaaccagaagatgaaaatgggagccaggatgatgttgattcctacggaaagaagggtggagcccatggcttttttagggtagccggtagctctcatcacatgattgaggttgaagaagacgtacgtgacgggcaggcccagcaaggtaatgagcatgaagtcgtacgcataggtgagggtttgcccgctggctccgaaggcggtcaggatttccgtaaggaaaagaagcgtgggaatcaccagcaccacagcggcaatcagactcatgatgaggacgttgccaagcgtacgctcagttccttcctggtcttttcttcccagccggatggagctgatggccgccccgccgatgcctaccagcgtgcccagggcgaaagtcaggttcatgatggggaaggtgacggccaggccggacagggccagaggccccacgccgtgaccgatgaacacgctgtcaatgatgttgtacagggagtataccaccatgccggcgatggagggcagggagtactggatcagcagacgccatacggatgcgttttccaattctgcgatgttgcgtgactgggctgccatggacgttcctcctttcaaaacaggtggcaaactataaaaacgcacggatgggttgtcaagctgtccacctgtccggaaaacggcctttttcccccagtttcagagagagggctgtttttgattgactgtggaagcttttgggggttgagtcctttccgcctttttcagaagcacgccatgaccatgtccgttttccccttcctgcgtcttgtctccgtttgcggcgccgctcttatgggttcttcctgtctgcccatgtttggcgccgggcaggtgctggcgggaagcagcctcgcggaaggtctgctgccctcttcctctctggagctggtgtggaggggagacatccgttcttttccctcttccggtttgaggacgccccgcgggtttaaagtttctcccgcggattcttattccctgctgatggaagcgcgcccggggattgccggagagtgggcctgctatcatgaccgcagcaattactactgggcttttgtagccggaaagaaggaggaggaagcggggctttacgccgtgcgccgcggcgtggccgtaagcggcatttccggagaaattgaagatgcccccgccgtgcatgaagcgttttgtcaagtgcttttttgagttattgacgcaaattttttcagagcggcggggaacaggcaggaaaaaggggcgcacaccgcgcctgtggacggttagaagccgttttcgggggtgggtagtataaaacccttaccttgttgttttcgcttctgaaacgccttgaaaatcaagcctttttgccccctattgcgtaacactccattctgttctttggaagaggtcgggggcgcgggggcagagccaccgcaaaacctaccgatagccaccgaagtagtgcagacggttttgccgttataatggagcggacggaaacgggggcaggatttttttatcctgttccccgttttcggcggtgaaatggcaacgacaaaaatccagacagtcaagggtttaagagtggagatttttttcgcgcactttgcgaaaaaatactactcgtcccttgacggtctggataggcggaacggagtgaaaagcctattgtttttagcgggtgtgtggtagaatatttttggcatagaatgacaatcagtatttgaggtgaagaatatggaaattgttttagcttatgataaacctaacgaattttttgaacttgtgacaggaagttcagtatttttgccgcgtccttgaggttatacagcgattgggaatatcccgatttccccgcctgtgccttgcgtgacaaaatgctctgaatgtagtcggcaagggtgggcggctcggtgttcgcctgttcctcttttagccaattctgcaatttagagatacgcgcctttatagggctgtaattttactgtaatcgttcatgttcataccctcctgcgtcaatgtatgtagtgattacagttaaaattatgcactccaggatgctcagccatcctccgccatgtaagcacagattctggtctttttgcaaaaaatgctgccggaactccgttttccggcaagttggacacgattggtttgacaggcagctgttattgcgggcgtattatgaaccgcatgaagttccttttattatcgtttgcatgggtgtgcatggcttgcgccggagcatgggggcaggatacggccccgtctttcccggccaatggggccaattacaggctgtttccggcggaccggcctccgctggttcccaaaccccagcagctgcgttgggacgacagggccattcccgtgcagtccgtacgcattttggctccgtctccgtccaggacttcctatccggaacagatgaagttcattgtttccgaattgaaatcttttctggcggagcaccgcgtgaaggtggctccggacgggacgtttgccgttaaattcgtcaagggggatgtgaaagccggcacggacaattccaagctgaaggaggaggcttattccctccgtgtaactcccggcggcgcgctcattacggcgatggataccagaggattctattacggcatgaaaacgctggagcagcttcttttgcgccgcggcgggacgacgaccattgccgcctgcgatatcgtggactggccggattttgaaatccgcggattcatgaacgatgtgggacgcaattacatgccgctgcctctgattgcacgggagctggattccatggcgcagctcaaactgaatgtttaccacttccattttacggagaaccccggctggcggctggaatccaaaatttatccggagctgaacgcccccgaaaattatacgcgcatgcctggcaagttttacacgcagaaggagtttaagctgctggtggagtactgccgcctgcgcaatatcctgctgattccggagatggatatgccggggcacagccagatgttccgcaaggcgctcaacgtgaagatgagcgatgaaaaagccaccaaagccctggtgtccctgatcaaggagttgtgttccctggttcccaaggagaaaatgcccatcatccacattggcacggacgaggtgcgcggcaaggatgagcaggtgaacaatgagattcttaaggagtacatccatgcagtggagtcctgcggccgcattcccatgagatggcagcccggcctgacgccgaagggctataacggctccatccagcagttatggtccggccgccagaaccgtggcgcatggcctaccgacggagcgaagtatgttgattccctggagacttacctgaaccaccttgatccgtttgaaacggccatgaccatgtatttccgccgggcatgcccgtttcggaatgcggaaggactgggcatgatgctgtgttctttcccggacctggaaattacggatccgcgcaaccaggttcttcagacgcccgtttacgcaagcatggcgttcgtttccgaacctttgtggaataatccccatgagaaggtgctgggagaccccaaccaggacgaatatatgaagtatttttccaatctgcccgtgcagggggatcctctgctgaaggggtttgcggattacgagaaccgcgtgctcgccatccgggaccgttttttcgtggataaggagtttaattacgtacggcaggcgaatattccctggaaattgctggggcctattcccaacggcggtaagacggaaaaggaattcgctccggaggaggacaacaaggcagggaagatgagggattcctacgagattgacggcgtcacctatgagtggtccggagacgattacacgggggccaccatcattttcaagcattactgcgattttccgacgctgttcaatggcgcaaagatgggtgcttatccccacaaaaaccacacttattacgcgcagacctggatttattcccccaaggcgcagacggtgcctttctggattagcggacatacctgggccacgtccgattggcgcaacggtccggcgagcgttcccggcaagtggtttcatgcggatcccaaattttttgtgaacggccgggagattgcccccccgcaatggaaaaagccgcgtaacagcggcgtgatggtggatgaaaactaccatttccgggagccttccatggttcctcttaagaagggttggaaccgcgtgctggtaaagagccccagcaacaattccgcgcgtcggtggatgttcacattcgttccggtgctggtgaaccccaagacgcccggctgcaatgtgaaggagtatcccggcctcaaattttccacacgtccggaatagaaaatcccgtgatgagcatccggagctggaatgatccgattgcagtatccgccatcatcattaaaaaagaagccacgcttctggcaaaagcgcggcttctgcttgcatgcaaaggacacggatacgaagttaagcgctccggcggcgcgttatcggagcggcaagtcccggcaggccaagggaagccgagtccggtccggcacgggaagagccccttcattgtagattcaatggagcagggtaaccctgtatggtcacagtattttccagggaatatgttccaatagttcatcaaagccgagccccgtgcctccaggaacagctgcctgagggtccatgcctcccatccggtctataaaggggtccggctcaaacaggaggtgggtgcagaggccgcagaggggaatttccgtgggcagggagttgcggtaatattccgccgcctggtaaacggcccagagctgccctacggggtgatccatgacagtggtgaagacgggaggttcgtaaagatattccggcgttgcttcccgtgcgggtttgacgatgcggatgatgggcaggtccgaggagatggccggctggtgttccacatccgaacccatgtccagggccagaggcatgccagcgtctaccagacgttcccagctctggatggagaaggggcacgggtcttctatgaagtctattctggttttcagatggtggggcagggatttccaaaatttcagggcatcgttttcattcaggcatccgttgaagtccagccgccagcgccaggagggaaccatggatgccagcatcgtcagccgttccagggcggcagccagattggcgctggccttgatttttcctgccttgaatcccttggattccatgatgcgaatggtagcggggctgacgcaggagggcagcgtggcgtggctttccggaatgtgaagaccgtcaaacaggctgacgcccctcgcgcgtgcttccccgtccgttcgggcgcactccgcggcgcggacgcccagaggcagagggcggcccttcctgagcgcgtccaattcctcttgcagggtggcgtctcccagttccggccacggctggatgcagccgtacccgccttcatccgttttaatgagggctcccttcctgcacacttccgcggctctggcgttcagagggccgcaggctgttaaagaatattcatggtaaaacacaactttaattcaaacaacctttccttcttttgtcacgatgaaaaaaggttttcattggattttggagggtgaaacgtctaagctctgcgtcatgtacagaacattggtgttcggggcggacggccgggtgggaagccgtctggcagcgtatctggaagaacatggcctggaggtggtgaagtgcggccggagcttttgtgatttgaaggatttaagcgctttgaaacgtgttctgctttcttccggggccactcatgtggtgaattgcgccgctgtgagcggattggaagcctgcctggatgatccggagacggcccaccgtgttaacgccatggctccggagatgatggcgcgcatttgccgcctggagggcatgcgctttatccatttgagtacggattatgtgctggacggcaggaggagaggtttgaaaacggaggaggggaagtgccgccccgtaaatgtgtacggagagtccaagctggaggcggaattccgtgtgcgggaggagatgccggatgctctgatagcccgtgtttcctgggtattcggcaatccggaacggccctcattcccggaaatggtgctgcggcgggcaatgaaaagggagcccctggccgccgtggcggataaatggtccatgcctacatgggtggaagatttatgtgcatggctccgttttctggcttatgagagcggggcgtccggcgtgctgcatctgtgtcagtccggagagcctgtttcctggcacagttatgccgtggccgtgctgaaatgcgccgtgaagcacgggttactgccttctttgccgcctgtggcggaacaaaagctcgacgaacaggccggtttcagggatgctcggccccggcataccgccatgtccagcgaacgcctctcttccctgatgaagcagcccgtgagggcgtatgaagaggccattgacatggccgtggcccgctatgccgcagatccaacctttctctccagcatttcatgaatgatttccacaattcccgtgattcccgccccaggcccgtttaccgggaccgccgttcccagccgggccgcccgcgcacagctcccaaaaagaacctttttgccaacaagtcgccggaagggagcgaacaatggctcaagccctgggtggaactgaagtatttcacatacaatccggccgtgttcccccgcatgctcggctccgtaagcggggaaatagcgccgggaagcctggtaaacgtctatgacaagaacggcgaactgttcggcgccggattctggaatgagtccagccgcacgcccctgcgcatggtgtaccacgggaaggacgtttttgccgaacgtgacctggatgctgcgctggaacgcgccgtgaagctgcgcagggaagttctgcgcctggatgaaaacactaatgcgtaccgtgtgctgcacggagattccgacggactgggcggcctggtggtggaccgttacgcggacgtgctgagcctggaggtgagtacgctggccgtctggcagaggctgaaccgctggctgcccctgctgcaccgcctgtgcggcacaaaacgccatgtggtgcaggtggatgagggcattgcccgcatggagggtatccgggcgaaggaggcgccggcatccccggcccccgtcaggctggtgaagattgtggaaaacggcatcacctatgaagtggacttcgcccaggggcacaagacgggctttttctgtgaccagcgggacaaccgcctcaagttcgcctccctggtgaagggggccacggtgctggacctgtgctgctacagcggcggcttttccattgccgccaagatgctgggcggagcggcggaggtaacggctgtggatttggatgagaaagccgttgccatggctaaaagaaacggaaatatcaaccatcagcgcatcgacttcgtgcatgcggatgcctttgtctatgcgcgccagatggtgcgcaacggccgcctgtttgacgccgtgctgctggacccgcccaaattcattgttggcagggacggatatgaagagggcatcaaaaaataccatgacctcaatatgttggggctgcaatgcgtgcgtcccggcggcctgtttgtcacctgttcctgttccgggctgctttcccccgcggagtttgagcataccgtcatcaaggccgcccagcggcaggggcgcaagcttcagattatggcgatgaccggccccggctgggaccaccctttcctgagcacttatccggagggccgttatctgaaggttctgtgggcaattgccctgtagctggaggttgaggcccgggatgcatttcggaaaaacctttcaggcgtgttgacgttctttgcccctctctgctttcgtggtgaggaatatggcaaaacaagtattgcagcggctcagttttacggccggggagctgaccccgtggctggccggacgcgccgacctggatcccgtgtcccgtggtgcctcccggctgataaattttctggtcagccccttcggcggtctccggcgcaggccgggaacacgcctggtcgcccgcgcgggatgccgggagggcatggtgaggctggtttccttcaagtactccacgggcgtgcagttcatgctggaagtggggcgcggctacgtccggtattttaaaaatggcgcgcttctgacggatacggaaggcggggtgctggaaacgcttactccgtggaagacggatgaacaggtaagcaacctccggatgcagcagctgaatgacgtgatttactgcgtggaaccttctacgccgcctatgacgctggcccgctacgcagacgatgactggcggctggaagcgttggagttttccggaattccttatgagagttccctgttgaatgccgtgcggctggaatgccgcatggtgcgggaggggagcgtcaacaggctgctggcgacggcggacgatgatgtattcactccggaaatggagggaaaggagtttctgcgcatcaccaggaaatatggagaaaccgtggcggagggaaaccagatgcctttttaccatttgacgactctgagccgggacctttacaagggagagactttttccatgaaccgggaggacggctggcggcaggcttatacctgcatccgcgatttcagccgggaaagcgactaccaggaaggggtggaccgcccggagaggtacacggccttttttgaaaaaggggccgatgccagtacccgcatttatgtcaacggcgcgtggacgttggagacggcggggacctgggatgcggaatgggaaatctgccgggggtatccggacggctccaattaccttcccaaccgtccggaattagtgtggcattccgtgaagagctttcaacagagggaggggttccggaataatttcaccctgagcggcaatgaagaggaaatgtcctactacaaaatccgcctcatggcttacaaggacgggtcttctgcgggaacgcccgtattccgcgcatcagctagctcctttaaccatgaagtggtggtggaggaatatgtttccccgcgcagcgcctatcttgcgaacgcccttcatctgtcctatcatacgctgagtgactgtgataccaatgactggtcttttggtgcgttcggaatccggaacggttatccgtgcacggtagagttccatcaggggcggctgtggttcggaggcactcctgggcagccccagacgctgtgggccagcagggtggatgatttttccgcgtttacgcccggtattccggcggattcccccatgattctgacaatggccgcttcccagcagaaccgcatttcctggatagcttccctccgggggctgatgattggaaccagcgagggggaatggcgtctgtccgccaccaattcagaagggttgaatgcctctaatgccggatttgagcgccattccggcgtggggtctgcctccctggatgccctgtctgtagaaaacagccttctttttgtgcagcagggcgggatgaaggttcgggaattattttattctctggaggccgacggttaccagacaagggatgtgagcctgttgtccgaccatttgctgggggagggaattgtggactggactgtacagaggagcacggcgttccatgtctggtgcgttctgggtgacggcagcgccgtatgcatgactctgaacagggaacagaatgtggtggcgtggcatgcacaccgcctggaacacggccgcattctgtccgtggcgtccctgcgcggttcccgcaacacaccggacgaggaagtatggtttgccgtggcgcgcggggaaggggaggaggcctgcattacggtggaatgcatggcggatgggaatgcctgcctggatgcctgcacggaggctgtcgtgaagggggagacgctgtccggcctgagccatttggcgggatgcggcgcctttctggtgggcggggacggcgcatgcatggacatcagcgttgacggagccgggaatgccgcctgtcccggaaggggggatggggaaacagtatccgtaggcctggccgctccggcggaagtaaggacgatgcccctggaaacgcttgagacgctgggttgctttaaaaagcagctcggtgcgcgcgtcctgcttcatgaaagcaccctgaaatcccgctacggaacgggaactccggaggcatggaaggatttccagcccggcaggtacggtgtttccgaaccttactccggctatgtgcggatgattcacaactatggtatggatgagcagtcttcctttgccctccgtgtggagactccggctccatttaaccttctggccctggtgctggatgtggaattataggcgcaggagtgcgtttacggctgttcagccgcctcttcatgggaaagcatgtgtacaatgaccttgataccgtgtttttccccagccgcctttgccagggaacgaatggcggaggccgtcattccattgcgcccgatgatgcgtgccacgtccgttttttccagaatcaggcggaagcggacggcgtctccctgcggggattccgcaacgcgcaattccgcctgttccgggtgttgcacgaattgcagggcgatcaattgcaggtactggcggatttgttctacggcaggatgcatgaagggaaatatgggttattttcatgaaccatactataaagccgcctgattgaaaagatgcaattccagacattccctgaaaaagaaagtcgccccggccgtaaaacggccggggcgccccaactaccctatgaaactggatcggttaagatccagagagcttttttaacgagcgctcacctgctcgaggcgcaatatagtggaggaaaaggggatacacaagtattttttcattggaacgatgtttttgttcaatggaaatagcatcgtatttttatttcattttgacaatatcgggaccggaggaatggttattgttattgtcatgaaatcatcttccgggaagcagttcatacgtgaaccccttcaggtattccgtttccggaatattcaataaaaccggatgatccgctctttggccgtgttgctgcatcagacgcagggtggccggagcatcaatagcggcgtcaagcacgctctcccggaacaggtccgctccggcgtggtgggaacagcagaaggtggaaaggatgcctcccggagccagaagcttcatggcgcggaggtggatttccttatatccgcgcatggcgtcatgcacggattttttgtttctggtaaaagagggcggatccaggataattaaatcccatttgtgttctcctccgtcccggacaagggctgcttcctttttcaggaagtcaaacgcattatccgtgacacactgcacggagactccgttcaggcgggcgttccgcgctacggcgtccatagcatcctgggaaacgtccacggccgttacctccgaggcaccggcaagggcgcaggccagggcgaaaccgccctgattgcagaagcagtccagcacgcggcgtccgcgggcgaagcgagccacggcggcataattgtcaagctggtccagatacaggccggttttctgtcccgtctgaaggtcaatcatgaattgcacgctgccgctgcgtgcggcaaaaggttccggttgctgtcctcgtgccacccggacggagggggaaataccttctgccgccagcatgggtgaatcattcctgacaataatcccgcggggagaaagaaggtcttccaaaacattcaggatgatggggaggcggcattccatggcgatcgtcagcgtctggacgaccagataatccgcgtaacggtccacaatgaggccgggaagcccgtcggattcgctccaaacgagccgggtgagagtttcttccggaagccggcggcggcgcagttctactgcctggctgatgcgcctggaaaagaaatctccgttcagttcctgtttgcggcgggaaaagcgcctggcgacgatctgggaatggggattgaacatggcggaacccagaaagcggtccttgaaatccttcagggccacgacgtcccccggctgcggattgccgaaaattttgcgcacttctgtgccgtaaacccagtcgtgcccttgaaaaatgcgtgctcttggagaaataatcaaacctgccatgtcaggaaaggcaatacatgatcggggtggaaagttcaagggtaatgcgggcggctcccagaaaggccgtgggaagggtggaggcctccgttccctgggatttttcgcgcaagtacgccgctgtgcatcattccgggactatttcggttgaaaatgcccggaaacgaagtaaaatagggcgcgttatgaaagtagaaacttttgaaactccccaggatgctgccaaggctttggcaggagaagttgcggaattgatccgtacgcgcgccgctgaaggcaaaaacgtggttcttggccttgccacgggcgccactccgctgcctttttacgcagagctggtccgcatgcataaggaggaaggcctttcctttgccaacgtgatttccttcaatctggacgaatacagcggcttggatcgcgaccatccggaatcctactggtacttcatgcacacgaatcttttcaaccacatcgacatcaagccggaaaacatcaacctgccctccggcacggtgaaggatgatgaaattgccgcccactgcgccgcctatgaacaaaagatcaaggattgcggcggtatcgacctccagattctcggcattggccgaactggccatatcggctttaacgaacccggctccgatgataccaccgtcacccggcaggttcatctggacgaactgacccgttccgatgctgctcccgctttcggcggtattgaaaatgttcccaccaccgccattaccatgggcgtggctaccatcatgggcgcccgtgaagtggctttgatggcttggggagaaaagaaggcgtccatcgtgaaaaaggctgttcaggggcctgtgacggtggatgtggccgcctcctaccttcagaagcatccgaacgccaagtttcttctggacaagggggctgcttccctcctttaattttacgttttagtaacggaaatgccgtctttcccggtttcgtggaaaggcggcgttttttatgaggtgaaggaaggcggaagcttcttctttccatggaagttatatgggaaatgccgcctatgcaggcaaaagggaaggggaggaggctgggcagggaggattttgtatcatcgtatgctaattcacacatcagcgcagcgtacgtttcaaactattaacatgtattggcgggtactggatggcatccgccatttttattggagataatcggggatttttccttcatcacgtctgggacgtgttgttgttctttttggaattccttatgttcatttgagcactaaatggttagttctcaaacaagaaacaattcaggaacatgaataattatataccactgaataaggcggtcggcccgaagcttatctgcgacggggagcaggctctcatcccgcagaaactcggagttgacgcgatgacgttcaactttgacggttcggcgtgcgagcacaccacttgcgcgggagcgccggaaatgttcatcaaggtcgaggaagacggcctgtattatttcggcgtggaagccgacgacacaggcagcatctccattgcgggcaacgagaaactttgtgagaaggatgggacaaagcccaacggcaagctgaatctggcaacgggtgccaggttcctgaaagctggctattacaaggtggccttgtcttacacgaataatgcctacacccccgtcagcaacaacgctgccgcgttcaacgtcacgatggacagggaacccattcaggcagggaagtatgaaggcaactcgacgatgaagcgcgaattctcgccgtcccccaaaatcaaattgtggacgattgaaaaggaatccaccatcacctgtgaagagtccaggaaagtggaggtgacgctcgaagaacctgcacccgttatcaaaaaaggtattggcgcttgcaaaacgaaattcatcatcccgcaaatcatcataacggcttgtaaggatgaagtgcttgagcgatggaacccgcgcgtccaacaagtttctgccggttccacgattcttgtgctcacgggaacttatagagacgcccttaaaaaccctcccgttaccgaagatgaagccgtcgaagcggtcactgtaatgaacggttatcaatctcgtggagaagttggaatatggcacacgtcggaagcttccctcgctcacgaagaacaccatcgccgtcaattcaatgatgccttcaaattctactgggacaatttgagaatacaggattcgatcgaattaaaacctgtttcctgcgaaaaatttccgaaaatggatgatgccttggcagaaatgaggaagtccgttcttaattggacaaccacctacttgaccgctgttaagaactatattgaattgttaccggatgaggccaatgatcgtccctactgtgccggacaaaaagttctgaacgaggcgacccggaagattattgcccaggcaaaggccaatggatggagcagagtacctgatgaagtcacggaaccgggaacgattgaaccgccctgtttccttccgcccgtcaacgaaatgtatgcccgcagcgtggctgctgcggaggaacaggctcccttgaccctctccattgcggatacctcccggtttagggaaggcagaatcacagtccgcttccgcaacgaaggaaacgagcctgtccggattccggacgaaatcaacgacgaaacagccgattatttcttcctgacggtgttgaggacggaacgggaggattcccgcatcctgaacagggaaattggcaccatgaccttccagcgacccttgaactaccgggaactggcccccggccaggaatacagtgtcacgattccgatatgcctggatgaagtcgatctggaaggctggaaacaatgttcttgtgaactggaaacgtgctactataatcggcagggtaaggattgtttcctggggatgctccgggcgacggccagactcgcgctgtaatgaaaaaaatcttccggtatttagtacttctggcaagcctgtccctccatgctgcggcatggggggacatggccgacaacggagtggaatgttccgtggtgatggaaaagacccggtttgacgcaagagagacgttccctgacttcaagctggtgttcacgaacaagggcgaaaagaccgtgcgcctgtttgacgacttctatcccctcaaagatgacggccctaatatccatatcgaaatatggaaaaaagcgggaggggaaagatatgggtacagagtgggcaaaatagagaatccaatagcctgttatatagccggttataaaatcgaacgggtagcggctttgatgcgcttcattacgttgaagccgggagaaaagcatgaagtccccatcaaggaagcttacctgttgctgacgtattttgaccgtcttcgcaatgatcagaactatgagctggaagtacgtttcagggatggatatgcgtatcccgatgctcggagggtgtatgtggggaaggcagaatttagtttgtcacgccggtcgcccaaaggagttcctcggtgaataatccagactgttggaggacatagcctattgttcccgttcttccaataacccacccaccagagagccagttatctattgttcagccatttgttccctgattatctctgttcgttgatacatttttttattatttctgagaaaggacaggttagttgaaataggtgaattaagggttcaatggcctgaaacctaataacgacgggggagaattgagacgatgggcgtagctttctccttatcattcgaaaatgaagttatgaattatcgtggaagaaatcttcatcacctgtgaagaagccaaggaagtggaaatcggttttgaaggaatggaaccggttattgcagacgaagcatggaattgcatcactacgcctatcattcccagaatttttgtgacggcgtgtaaaggatgaagcggccgatgtctggaagctccggattgcgggagcagaaaggcgatccggcaatgtaggcggtaatttatcagtcccattgtcttaaatgggattccaaatttattgaggtatcaaaaataccagtattttcaagttttgatcaaggaggggaggtttgtggactttgaggcggaattatgggatgacaacaggtttgaggaaaactgttgaatccgtccacggtgtgccgggaggatttcttcggacaggaaaaggccggggctatttgagccatgccaggaattcatggttgccgtccgtccccgtgataggagagggttcgcaccccatccaggaacggttcagctcctccgtgacgaaagtgcgtatggagtccaccgccctccggtgcagagccgggtcccggacgatgccgccggggcctatgtcttccggctggagttcaaactggggcttgatgagcaccagggcatcccccccttttttaagcagaggaaaggcggcgggcaggatttttttcagagagataaaggagacgtcggaaacgatcagatccacttgttccccaatatcctccggagtcatgtagcgggcgttgaatttttccttcacaatgacgcggggatcctgccgcagtttccagacgagctggttggttcctacgtctatggcatgcaccctggcggctccgtgctggagcaggcagtccgtaaaacctccggtggaagccccaatgtcaaggcagaccttgccttccgcagaaacggggaaggcattcagggctccttccattttcaggccgccgcggctgacatagcggggacggtttctaatggtgatatccgcgtcttcattaaccttgagcccgggcttggtggagggatgcccccccacgctcacttctccggcaatgatgagccgctgggccagctcccgggattctacgagattgcgggaaaccagaaggatatcgagtcgttgcttgctcatgattcggaaaaaggtgtgaacgcaggtatttcatgaaaccgcatgaagaatcaagaaaaaccgagcgcagagaggcattcgggcgtaaaaatgcggcattcctcgtactggagcattttacgattgattcaaggccggtttataggagactctgcggcggatggaacaccgctacaggcaattgatgcgcagagtcaggctttacctgctgacggaggtgcgcaaaaaatcgtgggcaagcaagttcctttccgccagggtttttgattctgtttactggtcatggaacaggcagtccgttgcaacgggagctgcctggggggctgccgcagcgattgcccctcttcccatgcagagcctgtggggcgttttcgcctgcctgtggcgcaagggtaatattcccgtagccattctgatggcgtggctctcccctcccggctttaccttttttgccattcccgctcaatggtggctggggtggttccttttttcgattttggggttccctacgtccggcgcgaactgggagatgctgaaagcgggggttcagcagtggtcctggacgccgtttggcggattgagcatcggcatggtaagcctggaattcgcagcgggctgggtggtttccagcgttgttctgggcagcctgtgttacgggctggtgcagttgggatggtggatgggccagttcctgcacagcagaaaaaagagcggcaagttgtaatagaaaaactgccgtctgtgtcaggcagggcggaaccggaaagccgggcagtccggaaaaatcagacggctacttccatcaacagaacggttgagttctggagggcttctatggagacggtttccgtatccgtaattccggctccgtcccgactgtgcaatatggcatctcctatttttatttctccgtctatcacgaagatgtatacgcccgtgttccgtcccttgaattggtattcccgttctatgcccctgtccagctccgcccaggaaaaccaagcctgctgcatgatggagatatccgtttccggagccaggaaggtagagatttcattatgcttcaacaggggggtgatgtcgtaatcccggtacctggggggcgtattgatcctgtccggaatgatccatatttgcaggaattccaatggttccgtgaggctgtcgttgaattcgctgtgctgaatacccgttccggcgctcatcacctggatttctccgcgcgtgatagtgtggctgttgttcaggctgtctccgtggcggagccttcctttcagaggaatggaaaccacctccatatttttgtgcggatgggtaccgaagccttcttctgggagaaccttgtcgtcattgagcacgcgcagagctccgaattgcatgcgttccgggttgaaataattggcgaagctgaatgtgtggtatgtatccagccatccgtggttggcatgtccacgggaggatgcacggtgaatggtaatgttcatgattgatatagggggagtgggagcggttttccgcctgcagaatgtttgaccggctgcaactctgggctgttcaaggcgaatgacattatttccaggaccgtaaaataaatcggcaacacaaattggtggtgcaatgtctcttcttttagggtagcgtgctgcagtacccgtgcaaagaagacaaggcttatggctcagcggacatttatgagatggatcaagggactgattcccacagtgattattttgctgggggcgttgttgctgggctgcatatgctacatctccatctggggggtgccttccttcgttgtgcagcgggtggagcaggctcttctggaaaagggcattccctcccatatagagacgctgaaagttactttgtggccccgtgccgtcgtgacactgaaaaatgtggaattgctggatccggaggccatgccggaaactcgccggcccatagttctgctgcatgaggcggatgtggcgctgaattggaaaaaactgatagaaggacaagtagtgccggagcgggtgaatgtgaaggggatggacgtctccgtgcccgtagatgcggggaatccggaaaaagttttttccgtaacgggggtgaacgcggaattgaatctggggcggcccggcatggtggacatcgtcaaggcagatgccgttgtgcagggcatccgggtgacggcccagggggcattttccattggtcaggatgattccggagactttacgctgacggctcaggatatgggcgccgtcagagagcagttgaatcaggtcctgaattacatgggccgggtgaagtggcctgatgcatctcctccccgcctgattgtcaatttaagcgacgatccgaaaggcggcgtgcgtgtaggcatggatttgcaggcgcctgttctcaggtacggaaaaatcatggtcagggatttcctgttcagcggggattacgcggattccgttatcatggccaaacactttaccatgcgggatgcggaaacggccggtttcgtcagcctttccctccaggccgatttgaaaaagcgcacgctgatctgggatgtccgcagtacggctcctctggtctcctgggcggtggctattgttgatgaagctctggtgccgaaggaaatgaagtttctgagcgagccgcatgtacagatatccggtcgtgcggttttttcggaaaattgggaaggcgtggaacatctgaatgctttaggttccgggtccatgggagcattttccgtgcttggggaaaaattccagagggcctcctgcgatttcagttatgaaaacggtaatttttatgtaactgatttggatataaggcatcccggaggcagtttttccggcaaggtaatgggagtggacggagagattaaggtagacgttcacagcacgctgcctatgaaggcgatgctggggatggcccgttccattgccccggaggatgcgaagctgccgccagcgctggaaatcaggggagacccggaattgaaggtgtacggttccgtggatatgggaaaggggtggaaagggccgttccaggtggaccgcctccagattgaggcttccgtggcggatgtcttttaccagggagtggaattcgtttccgctgcggccagggcggaattgattggccgttccattaacgtcacccaattggaattggtgcgggatgacggccgggtgaagctggaaggaagctatttgggcaccgaccttgtttttacgctggaatctaatctgaagcctgaactgctggagactctggctggaaattggttttctgtccctgaaaatttgcagcttccggaaaaagcggttttatgggtgcacggcaggctggatattccggagggcaagcctgtggagccgactctggtccgcgcacgcatccatgcggagaatcttgcctggaacaaggttcctgtcaaaacggcggatgtggaagcggaataccgtcccaaccagctttttgtgcaaaattgccggatggaaatggaaaagggcgtctttgaattgttcgccaacggttttctggacggtcagatgtttgtgatggggcagtccacggttccgctgcaaacgatagaccaattgttgagcatggaggatgacgactttttcatgaaccgctttgtcttccgcaaggattccggcctggagttttccttccaaggaacgttgggtctgtacaatctggaaaaggcttacgacttgcaggctactgtttccgcaaccaacacgcgctacaggggggtggacttgaagtctgcccgggcggatgcccatctggtgacggaccagctggtgctgaccaatgtgacgactgtggtttccaacggaaattacctgtcttccgtcggattgtccggaggcccttcggaatgcacgctcaaggccaagagcatagatttccgttttgtgcaggatacggtggaagtgcttggtctggaggggcaggtctatcccggctataccctgcggatgttttccgatagtgccgccagggttttgaaggagtttgtctttacccggcccgtaacgctttccggcggcggcatgtttccgatgggggatgacatgaagctgatgaaggggcgcatccgctttgacgcttccgccgggcgcgtgcgctatcccctgctgggaaccacgctggacctcggaaggacaaagggggaagtgttgatttctccgcaatgggtggttgtggacaagatgatgggaaccatctgggacggaaccttcacgggccgcattctggcgcagattgatgatggggatgccctgaacggttcttttgtcctccaggacatgaatttgacgtctatcgggaaatcctatgacaaaaaaatggagaaagccactgtgcacggagccattgagttttcatccaagggaggcaatatgaattctattcaggcgaagggggaggctgccctggtgcatggcgacctggtggaaattcccctgttcggatttttgggggaagccctctctaattacattccaggactggggcatctgattaattacaagatatccagggccgattgcgatttttccattgagaagggttatgtgcgcaccagtaatttcgcggcccagggaagcaacatgtctctggaggggggaggctggatacgcctttccgatttgcaggtcaattcagatttcaagctggggcttcgcggtttgccggggtttattacttccccggttttcctgttggccggagggctgtttcaagtgcggggaacggggcctttgagcaatgtttcctggaatttcgctccgttttccggagggaaagcccccgttcctcccgccgcggcgcctgcccggaaaaggtagggcagacgaaatatttgggtgttgcgcaactgccgtaaggagccgcatgccttgcagcaattgaaaataacagataccggatatctgacagaagataaagagctgtaaattcagaatgccccgtttacggtgctttccctcaggaaaaggagttcccggagaaatttttcttaaaccagagtataggcggaaacagctgtaatgctcaatttctgtaggaaagaccagtgaaacaggaggtttttccccgggaatgaaacccggggctgaacggtgccggagcgtaaaaacgtatgaactatggagccggaaggaaatatccccaccatgcaatcctgaagaaggtgcaggagttccttcatggaaaagacaggatgccggtttccgttgaagtgccgcgatttgcttcggccgttctcctatgtgaacgcccgcctgcatgttccatacgggtagatcgtgcggtccggtacgctgctggctggatgggaataagccgattccggggccggatcggctgttcccggcagggcggggccataatggcgttcttttactgaggagaggatgtggctttaccggaaatagtctgcggcaggagaggcggttttaacgggtaaaaaagcaaataaggcaggaggtgttggcgtaaaagaaggaagtttttattccggagtgggtccgttaaaaacggggcggctgaactgctccagccaccccgttgaaaaagggagttatttaccggattttcccagtttgtacccggcgtaggtttccgtgttgtacaggggctggttgtccggcacggcgtaaccgatggatttgcgaatggcgaggaagtccgccacgccttccggccccacctggttcagaggtgctttgtgcagtccggccatcagcaccatgcggcagtaggcatccgcattttccatgaaccattccgcttcttccacgtcacgtgctccggtaatgactccgtggttttccatgaaaacgacggtggattgtctggctgcttccgccacggcccgggccgtttccagagagccgggcgttccgtaaggggccagcgggatgtgtcccaggaagatatccgcttccggattgatgccggaggggggaacctgcccggcaaacaggaaggcattgcagtgcgggggatgggcatggatgcaggcattgacgcccacggatttcatcatggcaatgtgcgttttcacctcgctggtggaggggcggatgcccgctttctggcgcgcgtccatgtccaccatgcagatgtcttccacagtcatgaagcctttggaacacagggtgggggagcagagcagcaggttctgagccacgcgcacggagatgttgcccccgttgccgtccacatattcccggttccacaggcggcgccctatgtcgcacatgcgttccttgatgaccagaatttccggggaatggaagaattcattcacttcctcccgcgtgacggggttatatttttcccatgggaacactttgtccggcaggggaggggagattgaccagtcttctgacatatttagtagcgtgttattggttgaacttttcgtaggcggcttcctgggaacccggcatatatgtccggtaggtgatgccgaaggcggcccgggcctgctccggcgtagagtacaccccggcgcccgcaaaggcaaacatggatgcgcccaataccgtactttctgacacttcagagactttgacgggaatccggagaatgtccgccctcatctgggtccaaactctgtttctggcgcctccgcccaccaggatgaggaattcgcttttgaagccgcccacggattccaaacggcgcaggcgggatttcagccgccaggtgagagcctccatggcggcgcggtagatatggccgcgtgttcttcccagcaccagtccgttgatggagcctttccggtctccggaagccaggaagtccggaaccattgtcacgccgtcgcagccgggtgggacggcggccgcttccgcatccatggtgtcataggattccccgtgaaagcaggctgctttcacccattcgataatgccggagcccagccattggagcccggggttaagaaggccggattccgcgtcgaattccgccgtggcgccgtcttcataatcttcccgggccagcctggcctgtgcggagcgcgccatcaggatttcccatgttccggaggaaaggacgggctggttcttgtctgctccggaaccgaaaatggcgaattgggtgtcgtgcccggcggagataacgggaatgcccgccagggccgggagattcatcgcgtctgccgcttccggcgtaaggaggccaatggtttcccctgcatccacgatgggggggaagaggccgcggctcaaaccgaggcggttcaaaatgaattcggaaaaatctcccgtttccagatccgtgagctgggaggtccctgccatggtccggtctgtcgccatgatgccggtgagcttgtaggccagcaggttggagatgaagagccacgcatgggctttttccagaagttccgggcggttttccctgagccagacgagtttgtaaatggtgttgaaagcaaaggcccccacgccggagatacggttaagttcctcttgggagatatatttgccgatgtttttcatgacctccgccgtgcgggggcatttccaggatatgacaggatagagcaggttgccggcgtcatccaccagtgctccgtccacaccgaaggtggtaatcgtgacggccgtcacctgttccgcatttagcccttccagggccttcacggcacattcggagagctgtctgaaaatcaggtcggcatcccagacgtgaaattccggattttcctcaccgggcagcgtggcgttcggctgtgaggccttccccacaatgacgccttgtttatccacaaccatggcgcgcacattagtagcgccgcagtccaagcagagggagtacatgagttaagatttaatagtgaaaagttaataggaatccggctgagcttgttgagttggtttgttaatagaaatgagcattttagggatttctgtgctgtcctggttgacagaggaagattccgtttccgtcaggcttcccgtggcgcgcagcagtttaggccgtgcatgcgtcccggaatattccttcagggcgatgcggggtttggaaaagaagtcccttctgcggctcccgtaaacagcttcggataaattggcggcaatgcccgcaccggaacgtaggagctggctgagcaattcccgctcggcgtcctgctttttcaagtgcctgcatcattgaataatgcggactgcgaaagaaaagcttttcgcggaaacgggactttctgccatgttttatccgaagctgttaactattacctattaactgttaccttttcgttttcagtattttccgtataatggcccgtagttggcgcaggcccggaaatcagctccttccgggtccgccgtgccgtggagaccccaggcagaggggcggtagatttggtcatccggaatgttatgggcgtatacgggaatgcgcagcatggaggccagcgtcaggatgtctgcgccgatgtggccgtaagtaaaggctccgtggttggctcccatgttggccatgacgctgtacacgtccgtaaaggctcccttgccggtcaggcgcggggcgaaccaggtggtcggccagcccgggtcagtgcgttcgtccagggtcttgtgcacctcggcaggcagatcaacagaccagccttccgccacgatgaggacggggccgagtcccttgacgatgttcaggcgcatcatggtgacaggagcgccgcccctggtgacgtagtggacggagtagccgccgccgcggaagtattcccggttggccgggcaccagacggcttgttccatcatggttttcgcatcgtccggagtgacgtcccagtgttttttcatgacgggctgtccgtccttgcccgtgcaggccatgcagccgtccagggcggcggagccggaattgatgaggtggatgatgccgtccttggcatggccttccagcgtataacccgtgacgcgctttacggcttccgggctccagtaggtgcgaacgtccgcgaagacattggcctgtccggtcagcagatagccgaagaggaggcaggcgccgttgagagagtcattttccgtggcgaagggaagcggggcgcgcgggccgttccagtcaaaggtggagttaagcagggtttccgcgatgtctccgttcgggtagaagtccgtccagtggcgctggccctggaagccgtcggcaatggcctggtaacccagggattcttcttcgcggtcgattttcttgagtttgggattgccctgcatcatgtcgcggaagatcatggccatcagcacgctttccttgaaggttttgcggcgtccggcttcatccagcttcaggtccggacggtttttgtcctcggcgaatttaaagacggaatccgcccattgcatggcgaggtcgaattccgcttcgtcataaattttctggtccatgcggcggcgcacttccgtcatgtccacggcctgtacgcggatgcccaggtaattttcccagaaagactggtccacaatggaaccggcaatgcccatggagcagccgccgatggaaagatagccttttccgcggagggtggctacggcgaggccggcgcggcagaagcgcaggattttttcagctacgtcttccgggatggaagtatccgtggcgtcctgcacgtcttttccgtagatggagaaagccgggaatcctttctggttcaggccggccagcgcagcggccagatacacggcgccggggcgttccgtgccgttgaagccccagatggccttgggagtgaacggagccatgtcaaatgtttcactgccgtagcaccagcagggcgtaacggccagggagacgccgacgttgttggccttgaatttgtccgcgcaggcggcggcttccgccgggccgccgatgcaggtgtccgcgatcacgcatttgacgggttctccggaggcgtggcggatgttggcctcaataagggcggcggccgccttggccatgttcatggtttgatcttccagggattcccggacgccgaggcggcgaccgtcaatcgtggggcggataccgatggttggtaatgctgttttcatatcttgcgtaggtgatgtgaagctggttcatgcctgggcaggcttttcttcctcttcctttttcagatgagtgttgcggaagaagaagccgtaaattagtaccacggcaaagcagatgatgggaataaagaaggatgaccgcaccgctttttccacgaagttttcctgggccgtctggaattgcttcatgtccaggggcagggcgatgaggttgtccagcacttccgcctggtttccggataacgtggagagagccggaatcagggagaattgctgaatttgctgttctcttccggcaggagcggggaggcgttccagattggctttgaaaacggccagttccccaggcttgagggaggagcagccgggcagggatttggccgcctgctcaaaagcgtccccttccagggaggggagggaaaggaaggtttccaggtttttctggaatttgccggcggccctggcttgttcttctccgtccgcagggctggcttctgacatcctgtacagcgccagcatggctccggataaggatttgcgggcgtccgcagcttccgcctgcgcgatcagaggacggttgatggattcaaaataggccacctgattttttactgtggtgttgtctatccaggaacccatgtacggggtaatgactgcgccgcccagaatggccatgataaggcccgcagctcccagtttcacttcagaccccagtccgcgcagggcgatgccgtaaatagtggggaacatcagggacatgcagccggagattccgaccagtgtccagacggagatttccctgggcagatagatggtgcccaggcagcagagaatgccggcgacggcgaaaagggacatcatgttggccgggttaaattttttcatcagggccgtagtgatggcgcggcaggcgataaacaggatgatggaaaagatatagtagttggaggccgccgcttcctgcattccggggaagacggacatgatgtatttaatcgtccacgtccacacggcaatctgcacgcctacatagaaaaactgggccgccacgccgcagaagtagcgcggaagcttcaccagtttcataagctggcagcggtagtccggcatgatgagcaggaaggcgatgggcccgatcatcataatcaggatttgctgcaccatgctgaattcgaaagcggaatagtactggaacaggaaggggatgagaatcagggcgatgcagagtcccaggcggccgagtttggcggaaaggggctgtgtgttttcccgggtgggtacgttttcatcgtcggatttgtaacggcagaaaaagaaccagatgacggcggcgatggctaccaggcccacataaggaacgcatacccagaaaagttcatcgctgacaatggcgttcagttgttccgggtccatggctttgcgggtgtccatgtccgcatcgttcaaatgcgccagaatgaaatatttggccaggaaaatacccgtcagggagcctatgggattgaaggcctgggcgaagttcagacggcggacgctcgtttcctgggaccccatggagagaacgaaggggttgcaggtggtctccaaaatggagaggcctccggccagcacgaagatagccatcagatagatatcgaaactttgcccgatggcggcgggaatgtagcacagcgcgccgatcatgtagagccccagcccgatgaggacgcccgccttataggaaaattcctccagaaggatggaggcgaaaatggcaagcaccgcataggccccatagaaggaaatctgaactccggcggattccgaagcattgatcatgaatattttgctgaatgccggaaccaggttgtccgtcatgttgttcaggaggccccacagcgcaaaacaggagaccagcatgaagaacggcagccggtactgtttgggaacgatcggcacggtagaggtacggttgttatccatattgcttttgtcaatttctcacaaggacggcggtgcgtcaatctggaaaccgaaaagagtccagaaattatccaacctgttgatagaaaaaataaaatgatgcttttccatggtgatattccgtcagtgtccgcagaagctctttcttcttcttgacttgtgtttccgcggcggataggaatgaagagatgaagaagagtattctagccgtctgtctgggcctggtcggattctggagcgttcaggctgaagattctcccattgcggacccggaaagggtaaatgaacagggggatgcggaactgccttccggggaattgttgtcggatcatgtggcggaagcggaatttacgggaatgattcatcggaaatgcaggttccttacttccctgtgcccggacaagtgcgaccatgccagggatttcgccgttttccggatcgtcaagtacctggattaccggaaaccaggcaagtacggcgatgaaaagcaggagcagctgatggttgacgttaatccggcgcacaagcccatcctgcagagtgcggatattttgaagaagatatccgcccttaaaccgggggacaaggtggttcttcactgggctcattattatatgcaccggaattccagttctttcccggaacgtcccgtgatttccgtggagtaagcggctctttccggaggaaaaacgggaaagtaaggactggtctttcctcaggccgttcaagcggggctggacgcaacggaaagccgtgtgttaggaaacggaccggcaaataacgctgctccgggcaagattgccgcggggggcggcgtatatatcccgcgaaacacaccataaatacgatgcgtttatctttgaataaattaatggggcttggcctgttgtgcgtactgggcctgtctattccctccgttctcggcaaggaaagctttgagcaggccaggcgtggcaagtttacaacgctttccaccaaatacggccttatgtcctgccggaacggtgtggcggaaatcggaggagggggaaaatccggagaagcctccctgcggatgttcggcggacaggatgctgaattgaaactggacttgaaggatacgccttccagggaagtccggctttctgcctgggcggagcgatggaccgggcaggccccttttgaattttccattgtggccatagggccgaatggagaaaagaaaatttatgacggcaaggatatcaggacgggcgggttccataccaagatagaaaccagtgttcctgccggaacgcgttccctggtgttcaggcttacttctccggaaaacaagggaatgaagctggacgacctgtttcttgttccctgtattcccatgaaggtgaatccgcaggtggagatgtcctcttccgcttacccggtgatggtgcgtatcccgtgcagccctgttctttctctgaatgtccggacggacggctgccttaatcctcagttcctgacagctgtcaatctggattttacgggtacgacgaagctttccgacattgagtccgtggctgtaatacggggggaagaggcccctatcatccatcatggggaagagccgttcccgaaagactcttcccaggttcttggtacagtaaagcttgccggttccgccagaccccagatttctgtgaaggggaaaatggagctggagcccggagacaattacctgtgggcctgcgtgacgatgaaagaaggagccaccctggacggcagggtagtggtgcgtccggccagcgttgtggcgggcaataaaccggtgagggttgccaatgcggctcccgtggcgcagcgcatcggtgtggccgtagtcaggcatggggatttcaaatcaaaattctaccgtattcccggtctggcccgttccaggaagggaaccctgctggccgtgtacgatatccggtacaaccattccggagaccttccggccaacattgatgtgggcgtaagccgctccacggacggaggccgcacctggtctgatgtcaaaatcgccattgatgattccaagattgccccctctctgggtgctaccaggggcgtaggggatccggccattctggtggatgaaaagacggggcgcatctgggtggccgccatatggagccacaggcattccatctggggcagcaagtccggagacaattctccggaggcctgcggacagctggtgctggcctacagcgatgacgacggcctgacctggtccaggccgatcaatatcacggaacaaaccaagaacaaggattggcgcattttatttaatggacccggcaacggcatttgcatgaaagacggcacgctggtcttcgccgcccagtactgggacggcaaaggggtgccgtggtccaccattgtttattccaaagaccggggaaaaacctggcactgcggcacgggcgtcaaccagcagacgacggaagcccaggtgattgagctggaagacggctccgtcatgatcaacgcccggtgcaactggggcggttcccgcatcgtgggcgttacgaaagacctgggccaaacgtgggaaaaacaccccaccaaccgcactgcccagctgaaggaaccggtctgccagggcagcctgcttgccgtggacggcgttccgggcgcgggcagagtggttctgttttccaatcccaataccacatccggacgttcccacatgacgttgaaagcttctacgaatgatgccgggtcatggccggaagacaaatggcttctttatgatgcccgcaaaggctggggatattcctgcctggcgccggtagataagaaccatgtgggtgtgctgtacgaatcccagggggcgctgaacttcctgaaaattccctataaggatgttcttaacgcaaaaaatgcgcgctgattccgttttccggtaacatgttcaacgggccgttttcgttggagaacggcccgtttttttgtttccgggtgtttttgtgaaaggacttggccgctgcgctatgggttatttgccgctaaagacgggaaactgtaccaggaaccggctccccaccctttggcgggaaagccggcggtgtgttcttaacttgttttgaggacgccattgtcaggataaaaaggaagcaagagcctccttcagcatgtttctggcgcggaacagcaggcttttggtagcgggaaccgtcatatccagcgcccgggctatttcctcatagggcatgttttcgaaacggcgcagttgaacggccagccgcgccttttccggcagagcggcgattgccgcgtccacggcgtgctggagttccgtatgttccagtgcttcgtccggggcctgggaaggttccagaaacacggccatgcctccttcttcctccatggcgtctgcggaggtggtgggcttgcgcttctggcggcgcacttcattgaacaccagattgcgcaggatggtgaacatccaggtggtaaaccgtgcggaaggttcataattcccggctcccttccagatgcggatgaatacctgctgggcgatatcctctgtctccggaccgttgttcagcatacgggccaccgtcgcatatacggaattctggtgtttgcggaccagcatttccatggcggaagcgtcgccattcctgaccctcagcatcagcttggcatcttcgtctggttccgcaggcggcatgtcttgtgcttcatccatgaaattcccttttataaaccccgtctccggtgaaaggttgcagtaagcagggcgcattccggaaaaaggtctatcccatttttacacggctgactagatgaaaacgggtctttcttttctttccgcagggaatggaagtaaaatgttttactctttccaaagcccgggaaatattcgcgcctttgcgggagagaacccggtgcacgatggattctctccatgcccgccgatttgacaggggccggaaggggcttgtcagggcagggaagcatggaagaaaggaacatcggctaattaatttgtttaaggaatcattccgaattttttttcgcggcttcttcctggttcagttccaaataggtcattccctcagaagtttatgaagaaagcatgaaggaatgcatggagcggaaaacagggattcctcaatggtacgttattgtggacgggccgcggaataccattgcgggagccggagtaattgaaaacgattttcatgaccggaaggacttaactcccaatttatgtgatctttttgtagaggaaaggaaacgcggcaggggaatagccggggtggtgccggattttgtgaggaaggatttggcctctctcggatatcccaggctctacctggtaacggatctcacgggtttttatgaaagtccgcgcggaaagaagagcaaggaatggagaaagttccccggcaaaagggaaagaggggaaaataatgaaaaaccgtccggtgtttccgttggaagatgcacggagccacctgccgggggaggactctgttcttgacagcatttcctgtctgcctgataacttgataatacgagtacccctcagcagcatcaggaaacgccgccatgaaacaatgcatgaattccgaaaatttgcatcgccgcctcaagaagattatcggacaggtgcaggcaatcgacaggatgattgacgaagacgttccctgtgaagatgttcttgcgcagctcaatgccgccaagtccgccttgcataaggtggggcaggtcgtactggaggggcacatcagccattgtgtccgggacggacttgaacacggagacccggaagagacgatcgcgcgcttcaccaaggcggttgagcggtttgccaacatgatttgaatgggacaaggggttaatgcctttttctggaaggttcgggagggggcctcatttttttcttgaaaaacctatacccctataggtatataaatgcccgtacccgtatgggtatgaaaagaaaaatcatcatatgctggaccgattggaaaaattgctggaatggggagggacaaggcggaaagtcgcactgttgtccgtttccggattagctctgttgatgagcatgcttggcatggaacctttgccctttgaaatttcatggatagccattgtgctgtgcggcgttcccattgtgctggaagccgttcttggcctggcgacggcctgggatattaaggcggatgttcttgtttccgtcgctctggttgcctccgtcatcattggggaggacttcgctgcggcggaaattgcatttatcatgcagcttggggaactccttgaggagctgaccgtagcccgggcccggaagggtattgaaaggctggtccgtttgaccccggcgaccgcccggaaagtggaaggaaccagggaggaggttattccgacggaagaggttcgcatcggggatattctccgcgtattgcccggagagacgattccggcggacggcgttattctttccgggcacacttccgtcaaccagtccgtaatgacgggggaacctcttccgatagacaaggaagccggggatgaggtttccagcgggacggtcaaccagttcggaacctttgacatgaaggcggccaggaccgggaaggacagttccatccagcgcatggtgcgcctcgtccaatccgcggatgcggggaaggctaaaatcgtgaggctggcggaccgctgggccacctggatcgttgccattgccctggtttccgcagggggggcctggatggccacgggcgaattgattcgcgccgttaccattctggtggtattctgcccctgtgcgcttgtgctggcaactcccacggcggtcatggccgccatcgggaacgccaccaggcatggctttctggtgcgggaaggggatgccctggaacgcctgtcctgcgtgtcccatctcactttcgacaagacgggcacgcttacctgcggtgctccgcgcgtggcggccgtgcgcagtttcctgccggagctcccggaacaggaactttacagatatgccgcctgtgcggaactgcgttctgaacatcctctgggcaaggcgattgtccgctgttaccggaaagattcagtgcgggaacttccccaaccggagcaattccgcatgattcccggcaggggagtacgggctgtggcgcagggaaaggaacttctggccggcaacctggaattgttcagggaaaacggggtggagctgtccgatgaggccagacgtgcggcggaacggtatcaggaggaggggtgttccgtgatcttcataggaatgaaccggcaggccgcaggggtgatcgccctgtcggataccttgcgggagaatgccgtagccaccatccgggaagtaagggatgccggagtggttcccgtattgctgaccggggaccatgggaatgccgccgcgcgtgtcgccggacaactggggattgacctggtttgcgcggaatgcctgccggaggacaaattcaactggattgacgcgtgccagaaggagcggaaccgtgtgtgcatggttggggacggaatcaatgatgcccttgccttgaaaacctctcatgcgggaattgccatgggcggcataggaagtgacattgccgtggatgccgcagatattgtcctggtcaatgacgatatccgggaactgccccatctgctccgtctgtcaaggcgcatgatggggacaatcaaatgcaatctgacattctccatggctctgaacttcatcgccatcatcctggcggcgggcggcatcctgggtcctgtggctggcgcgctggttcacaatgcgggctccgtcgtcgtgatcgccaactccgtttttctgctgaaatggaggaggaaaaacgcgtgaatccgcctggagggtagggaaacttccccgtgttgattgccgggagggaacggagtccgtctttttgacgctccggtttcaccgcgccgggctggaaaacgcttggatgaaaagaaagtccgtgttattctttttccagttcggcaggggtgcccaaataaaggctgagattgcaggaacggcatgctgttcccgcagaacccttcaaacctgatgcgaataattccgccgcagggagttcgattgaacgggcttgtctcgtttttcggggaggtttcgtttccgctgttcccctgccggaacagaacagcattcatcccatgaacgatacctccaatttgtcttatcccggttcccgccgcatttatgttccgggccgtctgtacccggatcttcgggttcccatgagggaaatcattttgggcgataccttgttgcccgacggcaccgcccaccctaatgacccggtgcgcgtgtacgattgctccggcccctggggggacgctgcttatgagggaactgcggaggaggggcttccctccctgcgtgccgcctggatacgggcccgcggggatgtgaaagaggatgtggggcacgagagcatcctgcgtgctgcgggcaagacgcctgtgacacagcgttattacgcccaacagggcgtcattacgccggaaatggaatttgtcgccatccgggaaaatttgggcagggaacaggctttcaaggcgatatacgaccgctatccgaatgccaagagccgcccggacgaagccgcggaagccctggaaacgctcaccatgatgccacgtccgtccgaattggaggcgcaggagggatttgggccgtccagcatggtggcccgcgaccgcctggatcaccagcatgccccggaacgccggaacggctgccgcatgcctgcctactttacgccggaattcgtcagggatgaaattgcctccggccgtgcgctgattcccgccaacatcaatcatccggaatgtgagccgatggctatcggccgcaatttcctggtaaaaatcaacgccaacataggcaactccgcgctggggtccagcattgaggaggaggtggaaaagctgcgctgggccattcactggggggcggataccgttatggacctgtccaccgggaagaatatccacgcgacgagggaatggattttaagaaactcccctgtccccatcggtactgttcccatttaccaggctctggaaaaggtgggaggaaaggtggctgacctgagttgggaggttttccgcgataccctgcttgaacaggcccgccagggcgtggactatgtgacggtgcacgccgcccttctgctcaggttcgtgaaccatacggcgcggcgcatgacgggcatcgtttcccgtggcggttccatcatggcgcagtggagcatgatccacgaacaggaaaatttcctttattcccattgggatgaaatttgttccattctggcggcttacgatattgccgtctccatcggggatggcctgcggcccggttccgtggcggacgccaacgacttcgcccagctggcggagctggaagtgcagggggatttgaccatgcgcgcgtggaaagcgggcgtgcaggtcatgaatgaaggccccggccacgttcccatgcaccttattagggagaacatgagcaagcagctggaatggtgcatggaagcgcccttttacacgctgggaccgctggtaacggacatcgcccccggttacgaccatattaccggagctatcggaggggcgatcatcggccagcttggctgcgccatgctttgctatgtaaccagaaaagagcatctggggcttcctgaccgggaggatgtgagggaaggcgtggttacctacaaactggcggcccacgccgcagacctggcgaaggggcatccatccgcgcaatggagggataatgccctggcccaggccaggtttgaattccgctgggaggatcagttcaacctttccctggatccgcaaaaggcccggtccttccatgacctgacgcttccccatgccaacgccaaaaaagcccatttctgttccatgtgcggtccggacttctgcgccatgcgcctgagccaggatatccgccgccgctcacagcaataggcgtcttttctccggcatttcggggggcttgcggttccgagggggccagcccttaaaaaagaatgacaagccccgatatcctgctatagtacggttaagatgagaaattcattttttcctgcaattggtgttctttccttggcctccgctttgatttgttccgcatcttcctcctgggagactgattggaataaagcgctggagaaggccggaaagggcggacatcctgtgctggctgattttaccggttccgactggtgtcccggatgcattcacctgcgcaaaaatatttttgacacggatgcgttcgccaaatatgcggcagatcatcaattcgtgctgctggaactggatttccccaaggctgccgggaaaatgccgccggaacagttaaaattccatgaagagctgatgcggcgttatggcgtttcctcgttcccatccgttctgttgatggaaggaaatggcgctccctacgctaaaatagtgggtgccaccagaaccccggaggaatatctgaaaaaactggaggccgccggagaaacgaggaggaagttgaaagaggccgtagcggcggcccagccattgaaaggaaaggaaaaactggagcaactggttaaggccttgaacgtgcttccggaagatttgcagcctttccagaaggagttgattgcagaaatttccgctctggacccggaggacagatacggttttggaaagaagtctgaaaaagccgcagccatggagaagcagcggcttatgtgggaacagttctgccaaaaatattcggggaggatctccgcagaagaaacgcgctttagccgggaggaagcattgcagatgttggagaaaaaggatacgcttcctcccatccgcctgaagatcgccaaatatatcagtgatgggtatgtcttggaatgtaatttgcccaaggctttggaatacctggaaattgcccgtgatgccgatccggagtctcaagccgccaaaaaactggaaccgtggattgacaatatgcggaaacatatcaatcaggagaagtaaaaattgttccgaaaggcatggccgtcttccatcgaagggggagggccatgcctttccgttttttattttaaacaaaaaaacagggctgttgcgctatggctgatgaaggaaccgaatgtacggatgcagaaatgaatacgcaaacttacgtcaggaatgaggaggttgatgaagaaagcagccatttgctgagttgggatgagtggctgcgggaacatgcttcccagctgcttctgtttgcacgccagcagtcccgctctccggaagatgcggaggatatacttcaggatgccctggtacgtttggctcgcaaggaggcttccggggaatttgtgggtgggcaggaggcgtggctttcctatgtctttgcctccatccggcgtctggcggtggattatggccgcaaatccgaccgccgccagaaaagggaggatgaagcctgcgcctctgaacgggacgaagatgtttatacggacccctggttttccagtgctgcggcagatgaggaactcaaacagttcatggaaatgcagctcaggaagctcccttccaaattctccgaggtcattgtcttgaaaatatggggggaacaaacttttcagcaaattgcggaaacgctggaaatttcgcagaatacggcggcgagccggtaccgttacggtattgacttgctccgcagggctttgagaaataaaaagaatcaattctaatgccgctctacccttatgaaccatgaaacaacatcatccgccgcaggggaggaagacggcggtactgccgtcctgcagccccttcccgtatctgatgaactgatttcccgtctggccggaaagtgtgaggaaatcttccctttggagagccgtttccggcgtgatgaaatctccgatgatgaaattcatgagatggaatcccttttgaaacgttttcggccctctccggcaaaagtcctgttcagggaacaatgctgtgccctgatgtgtgcggaatccgaacatgagatggaaacccggttgaaaaggctttccgcttcttccatgttggaattttccgtctgtaaaatggcgcaagccatgaattgcgccagtgatgaaaaacgggaaaaagcgctgaacatccccctgtggcggcgttgtgcctgtatctccggcatttccgcggctgccgttgtggggggcgtcatgctggttcaacatgctctggtggcgcccgtagggacggtggcagccggaaatgccggggaagttccctcggaaaaggctgaaactcctgtgattcccggtgaaaagcgggagttgctccggacgcccaccctttttgaattgcagggaggggatgagcgcgtgcctgtgattgctcccgccgttatccgcaaaattcttcctgaaaaggaatattaaaaattgcggtgcatgaatatcgccggaattgtgcgatctgctgcggcattgcggctttccttggcaggcaggaaagatgcttggcgttttccggtgttctgcggcgaaggatgccgtcccggaagcggcgaaaaaaatgcacaaattttgaacattgtatggacagatgctgtatattatctcacatggatatgaaaacctgtatctttctgacattgggattgctggtaggttcgggctccggatattccattgaccggcccgcaggaagtacggacaaccttcagccgcctcctctgacgccgacaccgtacgcgcatcaggtgaagccgctcccctcttccaaaccggccagactgggaattgttccgggcacggtgccccaagcgctcgttgcgcagctggagcttagcggattccccggagtgctggtgaccaaagtgatgccggacagccccgccgccaaggccgggctccaggaaaatgacgtcatggtcaagctgggggatgtctccctttccggtccgcagtctgtgacggaagccctgtctgaaaaggtgcctggagacaggattacggctgtattttaccggaaaggaaagagggagactgttgaaattaccttggatgggggaacgctttccgctgaagaaatactggcggcccagggggatccccgcacgcagccccgcgcagttccttccgtccggcgtcagacggcgcctttttccggaatggctgcacggcctaatctcccccagcgtattctggatatgcagcagatgatggatgagtttttgaaggattccgccatggatgattaccggatggacgacatcatcggccggatgaacctgactcccggcgcggcgcagatgctccggagcttgcagggacttcatcaaatgcccatgcctcccatgggcaaggtttccggagggggccagagcatgtcttccgtccggatgtcggatgccaacgggactatcgtggtttcttccaattcccggacgggaaccacagttcatgtgacggactctgcgggaaaggttctgtattccggcccctacaatacgcaggaggaaaaatccgccgtgccggaagccgtcagggaacgcttgaaaaacatagaaaccaatttctgcttttaacggcttcatgaaatagcggagaaatccgtattcatgaagttgacgacagctgccccgtgcggggcagcttttttattacgtggaagaagaggggaaagctgtgttgatgcggcagatgaaaataatgacgggcagaatgaaaggaaaatcatggaaatgcgtatcctttaacaaaatagaccgcttcatggttaagtgcaggtgttgggaaaacggcggttttttcaggctgcccggtttctggcggcggtcttttcacaaagaacgacatgaatggttttatttttattttgtggatgctttgctgcgcttcttggagcctgggagcggatatatttgtttctcctgacggagatgacgctcatgcggggacggaagaatttccgatgcgttccgtggaggccgctgtgcggaaggccgggcaagggcattacggaaaaggctgccagattatcctggccgacggtatttatcacctggcggaaccgctgctcctgcgtccggttcattccggtctgactattcgtgccaagaatccgcataaggcggtattgagcggtgctcagccctttgttgcggactggaagcccttccgtgatgggatcatgagaacttccgtgccctccggactggaaatggacgtattattggtcaacggcaaacccatgcatatggccaggtatcccaacgcaactcctggagaacgcattttccagggaacggccccggacgcggacgctccggaacgggtagcccgctggaaaaatccggcgggtgcgtatctgcatgcccttcatcatcgcatgtggggagacatgcacttccgcattacggggaagaatggaaatacactggtcaagcaggggggctggcagaataaccgtccctctccgccgcacgaaaaatataaatttgtagagaatgtttttgaggaactggatgctcccggagaatggtatctggacagaaaggaacatatcctttacctgtatccggaacagggaacggacctggctgcagccagactggaagccggcggcctggaagaactggtcaaaatccagggggaaggctcatcccccgtcaggaacgtgacgctccgggatctggtgctgactggaacgcggcgaaccttcatggaaaaccgggagcccctgctgagaagtgactggaccattttcagaagcggagccgtactcttgcggggaacggaggggtgccgcattctctcctgcgaatttgccaggttgggtggaacagccgtttttgtggacgggaataatgaaaatcttctggtgcggtcctgttatatccatgacataggttccaacggcgtagcgtttgtgggggaccgttcctgctaccggggaccgaagaattatcgggaagccaaaggaatgtccttggagagaatcgacagggttccgggacctcgaaacaatgaatttcccaggaactgcatggtggatgattgcctgatcacccggacggggctggtggaaaagcagactgccggagtgcagatatccctggcccgggaaattaccgtcagaaattgttccatctacgaactgccccgggcgggtatcaacataggggagggggctttcggcggccatgtgattgaatacaatgacgtttttgataccgtcagggaaaccagcgaccatggttcgttcaactcctggggacgggacagattctgggtccgggaccagatggcgctgagccaggacaaggacgtcgtcctgctggatatccggcagcctaatatcatcaggaacaaccgctggcgctgtgatcacggatgggatgtggacctggacgacggttcttccaactatattatttacaacaacctcatgctttcctccggcctgaagctccgggaggggttttaccgcaaggtttacaacaatattatggttaacaaaaccctgtacccgcatgtatggttcaggaacagcggggacgaattttacaataacattatttttgaagaccgctaccgtcccgcaagcaacatggatttttccccgtggggaaaactgatggacaggaactttgtgcatgtgaagggcatgaaaggggtggaacccgcctccgaactggccaggcaatccggcaatgacaggcactccctgaagggggatgccctgttctctgctcccggtctgggggatttttccgtccgggcttcttcccccgcccttaaactgggattccgcaattttcccatggaccgtttcggcgtgcgttcccggcatctgaaagccctggcgcgaactccggatattcctgaagttgccgggaacaggatggagaaacgggaaacggtgctggtgaagaaactgggggcggaagtgaggatagcggagggcgaaggggatttgtctgtctttgggctgatgccggaggatctgggccgggcactggttattgtcaaggtacagaaggacggcccttgttcctctgccggcattctgcccggcgacgttcttctgatggcgggcgggaataaggtggatggagtggaaaagctcgaacgcctgctgccgtcttccggtaaattaaccgtaaccgtcaggagaaaccaggaaaatagaaaggcggatttgcagttttgaggatgcttctggcctccggaaaaagaggaagcggaaattacagaattccggtcaacttccggtaagtctccagggcaaaggaatccgtcattccggaaatataatcaagcatgtgcgccaagcgtgcagccttccctccgttgttccggggtacgccggtgccctgaagcatgatggcgattttttgggattggccggaggatggatgattcacccattccataaagaagtcgatcaattctcccagtaccttataacccatggcttccacttcaataacctccctggcctggtacacattcttgatggcgtactggtacaagccgttcagcggggcggccagttccgagctgtctatcagggattgttccaaccttccttgcagcaggtcttcctcgtggttcacgaaactgtccacggcggactgaatgcttttgccgatggcgagcgcgcgcatataatggatgcaggaatctttttcctcttttgcttccagttcccggacataacagagctgggattccgtcaggaaagggctgaacaaatccctggtggaagcaaaatccagaagtccggaaaaatacccgtcctcaatatccgcaatgcggtaacagatatcatccgcggcttccatcaaatacgccaggggatggcggctccagcaaagatgtgctgcatcaggtgtggaacgcggaatcaaccccagatgtccagccatgaaagaagcagcttccctttcctgttccccgatgccgaatttcttgcattcaagcttgttggccgcaactatgctgcctttcctgacggcggaggaataagattgcgtacagggatatttcataaaggcgcccaaaacagccgctgtcagtttcaggccgttgccctccatcggatctcctgtacgtgtcagaatgcggaatccctgggcattcccttcaaaaggcagttccaggccgtgccgtttcagggcggtttcaatggcgtcttcaccggaatggccgaagggcggattgccgatgtcatgggccaggcaggcggtggaaacaatagtggcgacatcggaaggcatgataggagcgggcagggaccctttcttcgccagccactcccctgccagcatgccgagggaagaaccgatgtgggctacctccaggctatgcgtcaggcgtgtgcgcacgtaatcattgcggcccaggggaaaaacctgtgttttgtcctgaaggcggcggaaagcactggaaaacagaatgcggccgtaatcccggtcataattgctgcggtttttctgtggagacgccgtaccccgatgcctggatccccagcgcgcgtccgacaaaagctgctgccaattcatcatccctgacatggtaaggaaatgctacaggggaatgcctggatgtaacaggagaaaaatagagagggagttcaataggtcagcatcagccccacgccccagtgcaggttcttgtcgtaattggtggaaacgctgaggtgtgaggtcaggatgtagtgcaggcccacggaataatcccggtccgtattcagggaaaaggaaaggcgcaggcgggaggtgagcgggatatcgtccctctccaattgcaggcgcacctttccgtccgtgtcaatgcgcgcatccgcaatcaggagcaggggcagcgtgtaccgggcgcccagggtgccgtccatttcccggtcctttttggtggtctgtcggaacatgttgcgttctccggcctcccccttgcggcaagtccagtccgccccgatgtaggggtaaagccattgcttctccccgatatacctgcccagcctcccttccgcctcataaccccgcgtatccttgtagcctattttccactctccctgcatgctccaccgggtacccccgaattccaggttccctatgttcccgttggtggcgaaatcattgttcacgctcaggtaccatttccggtccatgtcgtaaacatgctgaagtgcctgcatggggtggggaagctgaggattggggggagaatcctcatacgtaaaaatccggcccatgccgctcatcatgtggtacaggatatggcagtggaaaaaccagttgccgcgcgttttctccgcagcgttaaactcaatcacctgggtgtccatgggctggatatccgctgtaaacttgagcggagaaaaatccccatgcctgttcaccagccggaaaaaatgcccgtgcagatgcatgggatgcctcatcatggtattgttggtcaggattatgcgtacattctgtccttccctgatcatgatccggtccgtctcggaaagagttttcccgttaatgctccatacgtaacggttcatattaccggtcagcatgaaatgcaattccttaacgggcacgccggaaggaagagtggtgcgggaaggggacttcagcatgtcatacgtcagggtggttccttctccgtcctcctgcatgttgccgtgtcctcccccatgggaggaaccggacttcatgtccattatctccatatttccggaatgggcggtcggcatgccgtgatgatgcatcttcatatttcctcccatggtcatcatcccgttcatttgcttcatctttttgaagtaattcagcttgggaaaggggcgcaaaggctgcctttccccatggcccagccacagggaggaagacccggaagtatcctctgccgtcgcctggaactcaaaggccttgcctgattccggcacttccaagatgacgtcgtaagtttcggaaactgcgattatcatgcggtccacgtcaacgggaacaacgtctttcccgtcgctggccaccacgcgtattttcccgcccgcatacctcagccagaaataggtggaggatgctccgttgacgatgcgcagcctgatgcggtcgccgcccctcagccggggcagggaagcctgcgggatgccgttgagcagaaaacattcataatacacgtcactcacatccatggcgttcatgcgcttccattcgcttaacagcttggttgccatgcagccggagcgcagggcctcccaatagctctgtacactccccttgcggatggaaaaccagtcggagcccgtgtgaagcattctgttcacctcctggggattctcgttcgtccagtcgctcagtaccagcgtatattccggcagggcgtcctccgtcctgcgtgccgggtcatcgggccgtttgcggacgatgaacgctccgtacaggccgctctgctcctgaaaaccgctgtgggaatggtaccagtacgtgccgttctggatgatgggaaaagtataggtatgcgtagtgtggggcttgacaggagcggaagtcaggtacggaactccatcctggtcattgggcaccagcaagccgtgccaatggaaggaagtctccgtgtccatcaggttatgcacccgtattaccgcagtatctccctctgtaaaatgcaatgtggggccgggaatgctcccattgatggtcatggcctggcgcgtgactccggtaaaattgacgggagcgttccggacatataaatcgtattctaccgtttttgccagagaaggggagaagagtatcggcaagcagcacaggaatggaagaaaatggaaggttcgtgtgaacatgaatgggaaaaagcactgccaggaaagacctgcctcttgaatttccagttcaaaatgaaacgaatgtgatgtgtcatgcccacccttggccaaatctgctaaatggcggggcctccaattcggacggaatagggcgtctggaatttattttatgcgtcgttttttaaggaaatagggacgatcaggaaagaggccaggataagcaggcagccgatggacagaaggaacatgttggaatgctccctgaacaggagcagggaagtcatggccgccaggggaatcttgagattgttcataatcgccagctttacgggagttacccggcgcgcgccgtaattccacaggaaaaaacagactcctgaagcgatgacgcccaaataggccagcagccaccattgcacgactgaaatcccctgccagcaggccagtcctgacgacaggccggaaggcaaagtaaccagcagggcgcctgcataggcataggcgaagcaggatgcttcgcttctcctgaaccaggaatttttcagggaaatgtaggctatctgacctgccgcgaagcagaagttggaaagctggaccagaacgattcctgtcaactccccgttaccggaggaatatcctttccaaaggattcccgcccctcccatggctgcaagaatagccgccgccagatggagcggcggaagattctttttcatcaggccgtcaatcagaaccacataaatcggcgtggtggctgtaaaaagggcaacctggtgggaaggcagatagtggaaggcagcgatatagaaaagatacatccctccgaactggacggcgcctatccccatcatccccacggcatggctgaggggcgccttccggacgaaggggagaaaaacggcaaatgaaccggccatgcgtgccagtgcgacaaagctggcgggaagtccggacaggcaattccccagcagtccgaatgacaacgcccaaatgaaagacgtgagcagcaacgcaggcatgcgggcggaagcatatggagaaaggaaaaccaagtcaatgcccgtaccatcgggagtacgcaacattcattaaaaaagcaaaggaacggttaagctttcctgccagtagaaattaagctttttgtgtataagattgtttaatcagggtaaggatgtaatccatcctgtcctcattttttacagtcagctcgtaagatccgtttccatgatggccgatattggaaacgtccctggcgagtttgtaggggtcttccaatttcccttttgggagattgatccagagtttcagtccttgtttctgcaaagcgatatccgtgaaatttgaaccgttgaccgtgaaagctacataaagcttggttgctttgatttcgacgtcccctaaatcgaggattttatttctgaggctgttgtaaataccctgtaccttttccggaatactcttcaaccgatcctgctccgtgtaaactactacttctctgctgacggcatccacgtcgctgtttttcgatgaaattgttttgatgctttctgttgcattgagttttcggatttcctcaaaactgatggtttgattgctgtatttttttatctcccacagagcaatcggaagatctttaaaattaatggcttctttttgataagaagtaaagccttgggaaataaaaatgatccgggattgggaccaatccacgctgctgcgctttagtggttcattccgggcctcattatattccagaatgaaatcggctttattattaagcattgcagaaagataggcatagccttgatctacaacgctaaaattcttgtcctgcttgtattcgatgatgacaaaagccttattttttctgtcaaaagccaatgtatcaattctcaacctctgaacggagccggatatcgtgaattcggatttgacgaattccaacccaagcaacgtatttaaattggcttctaccaaatattgaatttgccgttccagcttgaacggggtttccttgacttggttcaatatttccagttttgaatttgaattgaaaagcggcattgagcagatgagggaaggttgcttgaaccatactatctttatgagggatggatgacaagacaatcatcatgaagcaaaatgggctatttaaccaattgagcattatctgctgactgttctgaacataaaaacaccccgaaatattgaattccggggtgttcaggaaaatggtacgcggtactggtttcgaaccagtgaccccatgcgtgtgaagcatgtgctctaccactgagctaaccgcgcgtttgcagtgcggaaggaatatatcgttcgtgccggggattggcaaggagttttttgaaatcgggtaaaaaaggatttcgcttttccgccgtcaacaagttcccggaggaatgaccggtgtacagtttctccgagggacggtttggaaaagtggaaaggtggcttaattccggcttgtacagcatcaaccgtcttcctacactccgggcatgagttgcacaagccctcccagagcatgggcccagattgataccaatgcgttgaggcacaatttaaacgtcgtccggcgcgtcatgccggatcaccgtctgatggctattgtgaaggcggaggcttatggccacggtctggaaggggtggtgaaggccctggatggcgaagattgcgcttttttcggtgttgccacggtggcggaggcctgccgggtgagggatgccggggcaaaaacatgcccgtttattctcggtccctgttttgagggagagcgggaggaaatcgtgcagaacggctggcgcgccgctctttccagcatggaagaggcggagcatttcaattccctgggcgccctttatggcaaaaccgtccatgtccatttgggcgtggataccggcatggggcgcagcggttttttaccgagtgaattgcacggcctgacggacaaactcaaacagttcagttatctggatctggagggcgtgttttcccatttatccgcagcttccgatgatatttccttcacccacggacagatcagcggctttacggaggccgtaaatgaactttcccaaggccatcggtacaagttccggcacctgtgcagcagtgccgctgtgtttaattacaaggttccctgcgccaatatggcgaggctgggcagaatcctgtacgggtattcccccatgccgtctccctataataaggagctgcggcctacaatgaccctgtacagccgcattactctgatacgcacgctgccgggaaatcacggcgtttcctacaaccactgctatataacgaaggggagcacgaaggtggccactatcggcatcggttatgcggacggctatcttcaatatctgtccaaccagggagcgagggtgtatatcaatggccagtactgtccggttttgggccgtgtgacgatggaccagatcatggtggacgttacttacatggaccatgtggagaccggagacctggtggaaatcatggggcctaatgtaagctgggaggaactgacgcgccgtgccaataccatccccagcaatgtgctgaccagcatcagcgcccgcgtgccccggatttacgtgtaggataatgccggggcatggtgattaaaagctgttgcccgccgcccgaaaaaaaacaggggatttgtttgcagatatgtttttccccggcgcacacggataaacgttttaccgtaccttttaccgctggcggattctattccagtcttccggccccagagcgcagggatcaggggctacccagtggcccggttctatttccacaggggtaaggtccgctcccaccgtctccggataggaggggtgctggatgcgatggccgaaagcagagccgagcggcgggttgatgggagaggggacgtctcccggcagaggctggtgcttgttggccctggaggggtctggttccggaatagcgtccagaagagccttggtgtaagcatgtttgggggattgatagatggtttccgcatctgacatttccacgattttacccagatacatgaccgccacgcggtcggagatgtgtttgacgaccgccagatcatgggcaataaacaggtaagagagtttgcgttcctcctgaagttccagcagcaggttgagcacctgggactggacggatacgtcaagggcggagacgggttcgtccagaataatgaggctgggatttaacgtcagggcgcgggcgatgccgatgcgctggcgttgcccgcctgagaattcaaaggggaagcggtcaatagcgctgtccggcaaccctacgcggtccagcaggccgcgcacccattcccggcgcgcggcgggggtgcccatgcggtggatgacaaagggttccgctacgatttgaccgatggattgcctctggttgagggattccgcagggtcctggaagaccatctggatgtgcggacgcagaggcctcattttgcgctgggagagtctggcgatattgttgccgttgaaccggatggagcccccggtgggtttcagcaggcggacaatgcttttgccaatggttgattttccgcagccggattcccccaccaggcccagcgtttcccccgggtaaatattgaaggaaacgtcgtccacagccttgacccatcccgcttgccgcaggaaaattccggagcggacggggaagtacattttcaaattgtctacttgcaagagaggttccggcatggctggtagaaaaagaagttaaaggttggcgcaacgggggcaggcttccacgaagtggtccggggatatttccacgaggggagggcgttccgtgagttcttccgcgggcacaccctgcctttggcagaagcggcatccgggaacgaaatccgcaatagaggccacctgaccgggaatggtgggcagtttggttttccgcacggaacttagctgagggatggaggccagcagtcccttggtgtaagcatggcgggggttggcaaaaagttcccggacaggggccttttccaccacgcggccagcgtacatgacgactacggagtcacagctctgtgcgatgacgcccaggtcatgtgtaatgaggatggaggatgaccccatttccgcctgaaggtctttgagcagggacaggatttgagcctgaacggtgacatccagggccgtagtaggttcatccgcaatgatgagttccggatggcaggccagggcaatggctatgacgacgcgctggcgcatgccgccggagagctgatgaggaaattcgtccacacgctgttccggggcggggatacgaacgcgctgcaggagctggatggctgcgtcccgggcttccctggtgttcattccccggtggagcatcagggattccccaatttgcctgccgatgctgtgtacgggattgagcgccgtcattggttcctggaaaatgacgccgatatggcggccgcggatgccgtgcatgtccgtctcttttgcctgaaccaggtcgcggcccttgaacagaatttgcccgtccaaaattttccccatgggctggggcagcagccggacgatggacatggccgtaacgcttttgccgcagcctgattcccctacgatgcctacgcaggtacctttggggacggtgaagctgacgccgtccaccgctttcaacaggccggattccgtttcgaagccggtgaccaggttcttgatttccaacaggggatcgctcatgtgttatttttccgtggcagaaggttccagagggtcgccgctttccgggatgacaggcacagacggcagcttgccgccgccatccttgttatccaggctttcaatggagtccatgtagcgatactggtcatacacggtatccacttcctcgaatgtttttccttcccgcttggcttccattgtttcctttttgatatcgttatccacccagtacagataactttccatgggatcaaatacgacgggatggcagaattgcgtagttgcactgttcggccatttgacccagcgccagtaacccagtctgatgaattccgtggtccagcagggaacccacagggcttcgtcatcaattttctgctgcactttccacgtggccttttggagttcgtcttccgtggctgcgtttgtttctgcgtccagcagcttgtccatttctttgtccgcgtaagcgcagatgttattggtataggtaataaggcctccacgctcatcataggcgtaccgggagtggaacccctgctcgttcatcggatgggggggagtgaatccccaggccatgaaggaggcctgagcgcgtttttccatgattttgcggaaagctacggtggagtccagagggtcaagctggatttccaggccgcacttgcgcgcgtcttccttcagcttgcccagagtggaagccagggaaggagatgaattggggaaggtgatggctgcggtgagccgggtgccgtccggtttgcggaggatgccgtccgggcaggggatggtgtagcccgccctggcgaaataagcgcgggcctgttccggggaataggggcgcgccttaatataaggattggtgaatttgccgaaacctgaattgtaggaattgagccgctggtagtctccgcggaaggtaatgtcaatgatattctggatattaagtgcgtgctggaacccccggcgaacattgaggtcattgaagggggctttggaggtattcagaaaaactccgtaaggagggcgggggtaaatggtgtaaaatgtgctgcggttgatgtagccgttgtgaacctccggtatttccatgcgttcgtgccatagttccggtttggtgatgttcaaaacgtccagttctccaatgcggaagagttcgatggccttggatggttccgcaatgaaattgtacacgatttgatccacgttatacatgtatttcgtgaattttttgtccttggcccaccagtccggcacgcgctggagcgttacctggcggccgcggatgataccgtccggcttgacaacgtaagcgcccgtagtgggcggtatgcgccactggtagcgttccacgtagttggggccgaactcgcaataaaaatgcggcggggacggaatgaacagcgtgcaatagtacgggagcagaggtttggcgaaggggagtgtgatggaaaagcggctgtcgtcgtagatggtgatgttggaagcattctggtaaaaaaagttgttgtagaatacgtcccggctgtattccgaagtgcggatatacatgttcaccaggaggtcgatggcctttaccttggctccgtccgtatagcgggcatctggatccagttcgaagtaaacagtgcgcctgtctggggattccgcccatttatgagcgattcctggaatgatttttcccgtaaccggatggatggaaacgaggccgatgatgatttcatcatacagggggccgcggaaaccgctgttgctgttcgggccgttgggccggaatgtgtcgggataggagccgggggcccactggcgcagcacgcctccttttttggcgttcgggtcccctatctccggattgtccagtccatcctcccacttcaggtcttgggggatgtccgccggggttttgaatttgatgtagtcgccttccgtctgcctgcggtgaatgacggacagggcggcttcatccgcaatgagtttgctttgcagtttttccctgactttagaatcttcctctttaaaaaacttgtcccggagctcccgtatttccttttgcttggcagcttcctcacgagccaggcggtcattgatctgtttgttccatcgttccgggaaggaatcaaatcccggtgggagtgtgccgaagggtacgttcggctgccagcctaccccctgggattgggaggaatccttgcaaccggacccggctgtcaacagaagggacagcatcacggaagaaagggtggaacggaggagggtggacagcttaagcataagaaatggcaaagcgggagtctttttatttataagtggtgaattttttagggtcaaaggcttcgcggacagcctccccgataaaggtgacgagcaggagggtaatcaccagggcggaaaaggcggaggtaaccacccagctggcggaaagatccgccagtccgtcattgagcaggcgcccccagctggcgtatgtgtcaggaaggccgaagcccagatagtccagggaagccagagccagaatgagggcggaaacgctgaacggaaccagagtgaccagaatggcgaccaggttgggcaggatatgaacgaagagaatacggctggtggaagccccaagcacgcgggcggccgccacgtagtcgccgcttttttccttcatggtggaggttctgagctggtaggtcatggacatccacccgaacatgattagaaggctgataatcaggaacatgcccttcatatgaaggggaaccatatctgaaataatcatgatgatgaaaaggaagggaacctgggagaagatttcaatgaggcgctgcatgccgaggtcaaacatgccgccgaagtatcccatcatcattccaaaggtgatgccgatgaaatatacgataggcaggtagaagagtgcggctttcatatttacctggaggccgccgtacagataagccagaatgtccgccccctgggtattggtgccaagcaggtggccccccttgaggggcggggaggggtggtagaagatacggctgattttatgttcatccgtctgtttcaggaattcctctttggtgccggggccgctgtaatgttccgccacaatgttgttgttttcatacgtggcgctgtacacctccgttctgtcttccagccagccggtggcccggtccacttttttccccttgcggaatttgtagctgatgtggggaagggcttcttcatccttatgcaaacgggaagccaaaccggaatacggcttgccgccgggctcgcagacgaggccgtcttcattcaccatcaaagcttccgaaccggggttggtggaatctcccgtgggatcgtatggaaccagaggcatgataacaagggagggttttcccggctggcctgcctgttttttcagttctcggtagttggcttccgcatctgcaaaatctccggtctggccaaatgtagaacccttgtatactttgcgcatcatggccggaaagtaccaggagccgtcctgaacgacaaggagggcccgcttgcccaccaggcactggtccatacaggccaatagcgtcaatacaagcaaaatgaggagggatacgtagccgcgggagatgcttttaaaacgctggatgcggcgcctggtgatcggcgttggatggaacctccgggggcctttcagcatgagccagaaaccgaggcctcccatgaccagcacgcaaacccagccgaaccacaggaatttcccctgaggcgtcagaaagccgccgttgttctggtccgtacagacgatgttgagcatgctcatttcccgtgagacggtgaagggccagcttaacgtgggcaggagcagcccgcacagctctcccacggcagtaagaaccgccagaatgaccaaaaggtatgccagttttctaaccatgtgtattattcaaatttgatgcgcggatccacagcggccacgatgatatcggagagaaggttgcccagcaccatcaggaaggaggtaagcagcagcgttcccatgatcagggcgtaatccttgtccatcagagcctggtaactcagcatcccgaacccctggatatcgaaaaccttttccaccagcatggagcaagccacaatcaggctgatgaggctgcccagagtggaggcaatgggtataaaggagttgcggaaggcatgcttgatgacggcccctctgaaactcacgcccttggccatggctgtcctgatgtagtccgcggaaagattgtccatcaggttgtttttcatcatcatggtggtgatggcaaaggaacttactacataacaaatcagggggagcaccgtatggtgcagcaggtctccggcctgttgccagaaccccatgtccgcaaagtccggagacgtaagcccgcagagagggaaccattccagccgcgcgcccagatacaccaccagtacggcgcccagggcgaacccaggtacggagtaccccaggaaaatcaggacggaagagatgttgtccaccaggcttttatggcggattgcctttactaccccaaggggaatgcagacggaataggtaataatggcgctcaggatgccgaagtacagggaaacgggaatgcgctccttgatcatgtcccatacgggttcattgtacttaaacgagttgcccatagttccctggagcagcccgtcaaagctggtcttgtacattacggcacgccaggcatagccccgagccttgtcgcggacggcctccgtattatccgtctgcctcatgcggcgcgcccagcgttccgcgcggtccatgggggattctatatccacggtccagccttctgaagcggctttccgggacggcgtgccggaaaagaaagcatctttcacgctgccggaatccttgtcctggcgaactacgacgacttgttctcctgtttcattcagattgatccgtgtatgcgtatcggaaatgccggaatattcatcttccttgtctccctctcccgctccgccgatttccccgaattcctcacgggaaatgaaaatctttttgggcagcacgcccagccattgcagataagccgtgatgatgggctcctgcaggctgtactgctcttccagccgctccatatccgcttcactcaggttattgtcgccgcgctgggagctggctttctgtccggacagggcgctcatgctttgctgctgcatcatctgctcaatgggacctcccggaacaaaacgggttatgcaaaagacgagaaacgtaacccccaggagcgtcaagggcatgagaaggagtcgtctgatgatataggtcttcattcgtcgcgctgaactctaccgatttgtggaaggtgaggcaagtagcaatgcaaatttgtaagcctttgctaacataaggcgctgtccggttcttctcaagatgaaagggaaacaatgcaatacggcagggttcctttcttttggcaggcctttcaggaggtgcggactttacattccttctcccaaccggcgcgccagcatgtccggaagaccggcggccagaatgcgtctttgggcctccgctacatcgtattccacgcggcgctggtagtacaccatgctgtcttcgtcaagcacgccgtaggcggcgcggggatcgccgtctctgggctggcctacggagcccacattaatcagatatttgttgattttgagtagctggatatccccggattcatattcatggatgcttccttcatggcggatgaatgtacgggggacgtgagtgtgtccgttaaagcacaggaattgattgtcacgcagcatattaatgctgtgggtggccgtatccacattcgtgacgtaggcccaggagttgggcttgtcctgtgtagcgtgcaccagaacgatttcattggggagaatgcgctggaaaggagcacggcgaagccactttttctgttcttcggaaagttgctgccgcgtccacatcagggcattgtaagctactgggttcatccctgccggattgtcttctccaatggcttcctcatcatggttgccgcgcacggtgggaatctggcggctgcggatgaattcaaggcattcggacggattggcgttatagcccacaacatcgcccaggcagtaaacggcattgcattgaagctgttctatatccttcatcaccgcttccagagcgggcagattggcatggatgtcactaatcagggctattctactcatggtattgtaagcaaagagcatagcactttggggaggttttgccaagcgcgtttgctcacaggaaatcatggttggggcacagggtgccggccttcccatgaccccttatttccgtctgtttgatttactcgtcttttgccggaggcaaagattccagggcttctctcagcccgtctaccggatatttcagggaattggccagatggctggtcatcaggtcacgggcgatctcatccgtgggaaacagttcccggaaggggatgcgttccttttccggtatgttcagcctgttttccagaacaaaaatattactcaccaggctgggtgtcctgttgcggggatccttgaataactcccggcccagttccagagcttctctggatttggaaggcacacggacgagcgcataaaattcttttcgggccgtaaggggaggcgctcccaaatcccgtgccttgcggtaggcttccgccgccttttcaaagtccggttgccggtaggtatcgctatacatgttgcccagcagggattgaaggtaccagctgtcaggattggcgttgatgcctttttccaggaagcggcgccccttttgaatgtatttgcggaagccttcccggcgttccatgggagaaagacgtttattgtccagataactggaggaagcgttattgcccaaatgccacgatccgttgtcccagtaaaaatcggagtgaggagcgagagaggtaacctggttgtagcggcgttccaggttggcccagtcggaaatcaggaaacagtcgaaagcttccatgctcagcacggccgccaccagggagcggagccctcccagggagaccatggcaagttgttgttccagataatcggaagaggaaagctctaccggattatccagcagcccctccgccttctcctgttccagaatatgattctgcaaaggcaggcgaatcatgccgaagcccagcagggcaatgatgaaaatgacgatggtcttcagcatgattcgcaattggttcgagttaattcatgttcaggcgcttgcggatggccttgtccagaagttcccattccggcacggaggctccggcttgccgggccttggagagagggtctccccagatagctgtgtattcgacggggcggccttcgttgtagtccacggcgctggacgggatgaaagcccccatggtttccgtacgggaaaggtggaattcaaccaaatcttccggcagggcgtagccgcgggccctggctgcctgtactacttcttccatgatgcggcgcgcgcgtacgacgttttccggattttggtagagttctgcaatgctgatgccgcccagagccaggcaaagcccgttaaacgggatgttccagacgagtttgtaccactggatttgctctgcggcgtcaaaggcgcgcgttttgatgccggcattggcaaacagctcggagagttccctggctttttcagtcccttccggcgtgggaatgaagggggcgaattggatgttgcccccttccagatggttgacatggcccggtttttcccgcatggcgcaaatgaagcacaggcccacatagatacggtccgctgggatgatgcgggcaatttcctccgcatttcccatgccgttctggagtgtaaccacagttgtgtccggccccatcaacgggggaagggctctggaaaatccggcgtttgccgtgcttttccatgcaacgacaacgaggtctaccgggccgacttcctccgtgtcccggtaaacgttgatgcggggcagggagatattcccatgcaggcttttcacctgaaggccgtgttctttcagatagccgtattccgaacgtacgatgaaggatacgtcctgccccgattcctgaagtctggctccgtaatagcaacccagggctccggctcccagaatggcgattttcatggcgtgcggcgcggttggtgatatttttcagagcccctggacgttgcccttgttatccaggtagatgtgcatggcgttcggtgagacgggaagggcgggcatgcgcatgatttccccgcagagggccaccaggaagccggccccgttggcgatttcaaagtcgcgcacggtgatggtgaagccggtggggcgtcctcggaggcgtccgttgtcggaaagggagttctgggtttttgccatgcagatgggaaggtccgtcaggcggctggcttcaaactgggacagcttctttttggcggcggctgtcaattccacaccgtccgccccgtaaatgttgcgggcaatgatgttgagtttttcttccaccggcagggcggattcatagaggggcttgaaaggggcggaactcctgtccgcagcttccacaaccatttgggccaggtctttgcctccttctcctccctgggagaagatatccgcaatggcgcagggaataccgcgttccgcgcagtgtttcacgatagcgtccagttcttcccgggagtcgtcaaagaatttgttgacggcgaccacaacggggcgtttgtagtgggcggcagcgtccagatgcgcatccaggttggcaaggccttttttcagcgcatccacgtccgtgtttttcagatccgcaagggcagttcccccgtgcattttcagcgcgcgtgccgtagctacgatgacaatggccgccggatccagtccggactggcggcatttgatatccaggaatttctctgcacccaggtcaaacgcgaatccggcttccgtgacggcatagtccccaaaatgcagggccatcctggtggccagcacggagttgcagccgtgggcaatgttggcaaacgggccgccgtgcaggaaacagggcactccttccacggattggaccagattgggcatcagggcatctttcagcagggccatgacggaaccggtaatgcccagttcccttgcgaatacgggcttgtcatccgtcgtgaatccgatcacgatgcggttgatgcgttcttccatgtccttgtaggaagtggcaaggcacaggcacgccatgatttccgaagccggggtgatatcgaagcctgtttctcgggggaacccctgcttgttgagccccacgatgatggaacgcagggaacggtcgttcatgtccatgacccgcttccatatgactttgcgttcgtcaatgttcagcgtgtggaagaacatggcgttatcaatgatggcgctgatgaggttgtgggcggatgtaatggcgtggaagtcccctgtgaaatgcatgttgatttcctctgctggcgtcagggagcttttgccgcctccggtagctccgcccttgcggccgaacaccggtcccatggaaggttgccggagcgccaggcagacttttttgccgatggcctgcaatccctgcgccaagccgatggaaacggtggttttgccttctccggatggggtgggagtgatggcggataccaggatgagtttgccgggggctgccggcttgtccaatacgtccagggaaattttggccttgttgcggccgaaggggatgacgtctttttcatcgacgcccagcttgttgatacagtcggagaatgcaggtgtaaccatgcgcacatgatgacggaagccccctcttttggcaagaaggttcatgggcattccggaccggatgaatcaatgagcgggaaagggccgccttcttcctgtcccgcggcattccccggatatccatgcaactccgggagaacctccggaaatacccggtatggcaggttgcgctaagacgggggtaagaatcagggttgcgctttctgtttcctctcagccagcacgggacggtagtggcccgtgatggtgtgggaaaacaggaagtcttcttcctgcgttccggcgcctacattatgaatgatcagcggcgtgccttcctccgttttccggtcggaaacgatgccaatgtggggaatactatcggacaggttccatgtaaccaggtcgccgggctcgtagtccgccgcgttttccgtaatgggaacggaccaaccttttctggcaaagaaggtacgaagattagggaccctgcggtggtcaatgctgcggtccgtcgttttcaatccccatattttagggtatttggaaaagtgggccttcatgtcctcatgcacggctttttgaaggtccaggccgaaggccctcatggcgcggatgaccacatccgtgcatactcccgtttcgaggggaacgtctccgttggggtagggaatggattgatagcctccgttgtaggaaaccgttactcctacctgttcacgcgccctggccgccagcgcggcgttgtccgccatcaggcatgcagggcaggaaagaaacaggaggatgagaagggccgccggtttcatagggcagatggggagggaaacgcggaaaaatcagacgaagctggcaaagccgatgtccggccggcgctgcatgccgtgaaattgaatctttttgatttcgttgtgggcacgctggcgcgcttcggagagggtatctccctgtgccacgacggccaggacgcggccgccattggtttcataacagtttttatccgcattccatttggtgcaagcgtggtaaacggaagcatttgaaatatcgtccagtccctgaatagcgtcgccggaatgggaggtctccggatatcctttggaggccagcacgcagcagacgctccagccgttttggaaggaaatttcttccggcgcaaattctcccttggccccatgcaggcagaaggaagccaagtctccggagagcaggggcataacggcctggcattccggatcgccgaagcggcagttgtattcaattacttttgggccgtttggagtcagcatcaggccgaagtacagaaaaccccggtaaggcagtccgtctttttttagtccggctaccgtcggagccacgatttccttttcaatgcgttccagcatttccggctccaccagccggcgggaagccaccgctcccatgccgcccgtgttggggccagcatcgccttccttgaggcgcttgtagtcccgtgccgggcagaggatgagataatggtcgtccaccagagcgccgaagatggagacttccggtccggtaagaaattcttccaccagcagccgtccttcaccaaaacgcctgtccgtaaatacttctttcaggaaagagtctgcttcctccttgctcatgcagacggctacgccctttccggcggccagaccgtcaaatttcagcacggtaggatagttgtttccgatgaattgccgggcttcctccaatgtggccgctacgcgcgcctgcccggtagggatgcggtggcggagcaggaagtccttggcaaattccttgctggcttccagctgggcgctttcttttaccggcccccagcaggggatgcccgcacgggagcaggcattggccaggccttcatccttgaccagatagctttcctccccggcaacgcagagatccattttattggaaaccatccagtcgatcagcgagggcagatccctggccgggatgggggtagccagacggttgatggcgtcacttcccgggaaacagtacatttccggagcggagggagattccttgagtgccttgaccagtgcatgttcacgtccaccttttccaataacggctattttcatacgccgccagtatgccgggacggactgattttgccaagctgaaatgaacggtgaggttttcccttttgtccggttgttcccatgcttttcctccattgccgggaatggggttgtaccactttttcttttcgtggcacggcgcagccattccgttcggggaagatgatgtaaaaaggccgcctgacccggaggaaaggcggcctgtaaaaggaaagggtggtatttgcgtttagaacgggatttcgtcgtccatgtctccgaagtcgttggacggctgattggtggggggcatggggggcgggttgtagttctgggccgggcgggattgtccgtagttgttggaacggggagcattctggtactgctggcgcggagcacctcccatatcgccttcaccgccgcgggggaagagctggatgttttccccaatcacgcgcagcttggtgcgtttctgcccggaggctttatcttcccaggaatccagttgaaggcgtccttccacaaagactccgcggcccttgctgaggtagttgccggcaacttccgcctggcggttccaaagggtgacgtccacgaaagtggtttcttcctggcgttcgctgttgtcgcccgcgtagtaacggttgatggcaaggcggatgtccgtaacggcggttcctttgggagtgtagcgcagttcgggatcagcggtaaggttgcccattaagaagactttgttgagattggccatataggatgggtgttaacgaggtgtatggtatataggaaaagggccttgccgtttaggaggaaggcatgtgtttggtcgctagcaagtatgggcctgcacatggtcttgtgcaatactaaattacggaatcgtccttcatcatgtctcctttctacattgcattcgtcatggaaccgtgaaaactttacctccatgagtttcaggcagcggcggagaaacggactgttccgggtttcctggggcacatgccttttgctgtctgtgctggcacacctgtttttgctggcggggagctgcctggttcctgaagaatggctggcttccccacgtccggctgaagcggcgcggaggaaagtggctgtaagcgcgcgcatggtaaagaaagtggaacctcaactggagagccggagacaagagcccgcggaatatctgcctgccgtcgtgaagaccaatgaggagcaggaaagcgccaccaggccggaagtgcccaaattccagagcaacaggaacacgcgggcggaaggcggccggaaggatccggacggcgacagggatatgcccgcccaggatggcgtggaacgggaaaacggagagattgtcctttttaaccaggaaaggcaggatggggatttaagccatgaacgggacggcaacaaaaacgcctcccccggagcttcttccaatgttccctaccagcccctggaaccatccatgccgcctgccggtcatcccggttccctggctcattctcccgtcaagaagggagagccaggcaaatcggaagaggaaaaaacggcccgacaaaacatccgtcatgcacaggagaaggccatgcagcttccccatgcggtagtgttgcccagccccggagattcggagaagccggatccgcttgaggaattggccaaaagcattgcgaaaggggcggacaatcctcccctgaatcttcccaatctggatttggtgcccaatacaaaaccggttcagaaacagcccttgtatgatcctatgttcaatgcggagagccagcccggcttcaagacacatgagcggaagaccaagcaggtcggcaaattcagctttggccgccgtccgacattggatgtggaagctacgcccatgggaacgtaccaggcgatcgtttaccgggctatcggggaacaatggtaccgccagtgcgatttgaaccgcgacctgattgttaccggaactgtgcgcatccgcatcctgattaacaagaatggcaaaatttcgtctatgaggcagacttcccgcgtgggagccagcgaggtgcagaagtcctttaccttcctcgccatcaaactcgccaggcttccagcgatgcccccggaggtaaggagtatgcttgtgggggattctttggaaatgtatttcgatttcaatttttaacaacctaccatcctgcaacaaataccattcacagatatatgatgatgaacttgatcaaagactgcattacattcttccaggcaggcggcgttttcatgtacccgctggcagcctgttccgttcttcttattgcggccgttatttaccgcatgttcaatatgaagaagagcctcatttgccccgtcgtgctgaccagggccgtggagcagtacacccgcggcgccgtggggcgcactgaattggagagaatagctgcggattcggattccgtggagggccgcctggtgctggatgcgttgaatgcaccgctggaggatgaagcctccctgaaggaaatgatccaggtgaaggcccgcgaggagtttgtaacgcttcaggcgggtctgcccctgctggacatgattgtgatgatcgcacccatgttcggcatcctgggaaccgccagcggcctggtgcagattttcagcgttttcggaatggatgagagtcacggcatgattgctcaggggattgcccaggctctgaatacgacgattgccggtctcgccatcgccactccggccgtgattgcccacgtttattattcccgcaagctggagcgtatttccgcctccatggaagtcctgctgacagaactggtttccttccgctgccatcattcccaacgctgacaaggccatgcagttttaccgcaagaaagcaaggagcatgggggtgcccatcgtccccatgattgacatattgaccattctgctgatttttttcattgtccatacgcagtggaagaagccgcagtccctgcttaagatagatgtacccggagcggaattcatggaggggactccgtcttcggaacagcgggccgttttggccgtgacggggacatccgccatttccctgaatggcaggctggtggagatgaatgaactggctgctgccctggaagccttgaaaaaggaaaatccaggcgtcaaactgcagcttgatgtggataaaaaagcggagtttggcatcattgtcggcatttgggatgcgctgacgtctgtgggtattgacgcaggtgaggttcctgccagaatagaaatcaacaagcccggcgcacggtaagcgccttaacatatatattatccccctcccgatgttattggaaatagcacagtatggaaatccggtattgaaggaaaaatgccgccctgtagaacattttgacgacagcctgaaaaccctggcggaaaatatgctggaaaccatgtacgcagcagagggcattggcctggcggctccccaggtgagcattcccattcaactggtagtgattgatattccgaaggaggaagagtccgtcacctggcttaaagtgaacggagaggacaaagagctttccgacatcatgcccttgatgtttgccaatcccgttctggaaccttacggccccatgcatccctttcatgaaggctgcctgagcgtgatgaaaatacgtgcttccgtcgtgaggccggattttgtcaaggctacggtgcttctgattgacggaagagaaataacgattgactgcaacggccttctggccagatgcctgcaacatgaatgcgaccatttgaacggcatcctttttgtggagcgcgtttcttccgcacagaagattaccttgcgcaacaaattgaagcgtctggcattgggatattagctttccgtgacatccctcaggccctttatggcagccaaaggagggggggcaaagaagaccgcattccggaaccgcaaagtttttacagccaggaaccgtcccgtgatgttcccggcagactataatccacccgggttcgcagtattcggaagagaagaggtcaggacgctttttccggatccggctgaatcggttttccggattctcttttgacgcgtatttgcaaatctgccaaagcgttcatgtagtaaatgtacgcgtcaaaggcggatgcatacggcgtgaaggagttttccttctgcatgtagtggaagtggtccgcgctctgcagtttgcgccaaacgtgggtgagatccttgtcatgggctgccttgaccggtttttccagacggtagattttgcggagggcttcatcctgcatgacgttgccattccaatgggacatggttccaaaagtggagcaggtcatttcctgggtgcactcacagacggaaacgggcttgatttcctgcgctacttcggacggagtcatgaaccggttgccggcgtctatgcaggcgagaatcatcgtacgccagaattcgaagacgcctgtagcgtcagactggcgttcccccagcgtttcatagtccatggacagggttgtgacgcttccctgctggtgcgtcagccaatccgcgaaagtggtgggggaaagcgggtattccgaccattccggatcagtccgcatgattgccaggtcattggagagttccctgttgcggaagatagtggtggtgttatacacccacggagccaggaagacttcattgctggtaaatcccttgagcatggccgggttgccgtccgccatgatgcccttgaagccgagcgtttccgcctgcgccgcaatggcgttggagtacagcatgccggtattcatcagcacatccgtttcctgatggaagagttttttgagaagctcccggtgttcttcaatctgttcggcaaattcctgaggggagtaaacggatgccagggaattgtaataaggcattgccagaaagtccacacagccggtttccgccagatccttgaatgcggcaatcaggtccggcctgtggtacagggcctgttccagaatgactccgctgagcgccagcccaaagcggaatttgcccccggtgagttcaataagctgtttcatcagccgggttgccgggaaataacagcgttccgccaccgtgctaagcacgcgggcattcagatcatcatcttcataaaaggcatgttctccaattttgaagaagtcataatgaatcagccgattgggctgatgcgcaacgaaagtgagggaaatgttgctcatggacggggtgaagaaggctgagagttatggagtagggtaaaaaggcgtttttagcggttcagcacatgttcatagacccggataaccttgtctgcggcggcatcccaggtggaagccttgatgtcctccgtgctctgttccactactttccggtacaattcctcatccgtgcagagatggacgatatgttccgccatcttgttgacgtcccagaaatccgctttcagggctcccttcataacttccgccacgccggactgcttggaaatcacggcgggaatgttgaattgggccgcctccagcgcagaaaggccgaagggctccgatacggaaggcatgcagtagatgtccgtgatggagaggagttcattgactttgtccttgttcaggaagccggtgaagtggaatttgtcgcccacgcccttgaaggctccggattcgatcaactggcggagcttttctcccgtaccggccatgacgaagcgtacgtcgtccgtctgttccagaaccttggcggcaatctgaaggaagaatcccgggcctttctgagccgtcaggcggcccaggaagaggacgagtttttccggaaattttttcttccctttgaagactttgaccggatccgctccgttgtgaatgggaaatatcttatgggggtcgatggcatagtgcccgctggcgatggttcccgtgtatttactgaccgggataacggcatccgcctgttccatgccgaatttttcaatgtcgtaaatccagccgcgggcatccgctccggcacggtcaaactgggaagcgtgcagatgcaccaccaggggtttgcccgtggcttttttcacttccacgccagccagataggtcatccagtcatgggcgtggataatgtcaaaatcctgctgaagggcgacttttaccgctatttttgagaattgaatgactttcagggccaggtctccggcgtaaaggtcttccttgttcctgaacagctgaaggtcggcttcatgcgttttggagaaggtgatgcggccttccttggtgaactgcaccacgccggattccccttccacggtggtgtaggggtccagttcaatgggcgcgcgctccaccagggcaaagctgtcataggaatatttccggtccacttgctccacttcccgataggagacgttattgagaccggtgagctggaatccgtcaaaaaggacggaagggtcggccttgggaacgatcacccttaaatccactttttttgccagcgccttggaaagacccaggcaggcaatgcccaaccccccgttgaccaggggcgggaattcccatcctaatgtaagaactcgaattgtgctcatcggttgatgtggtttgtcggtgccgggaaggatacggactcgtgccgtgttgtacaccaacgcaataaaaccagatttttcatgttcggtctagattaatatgaataattttactctaataatgaaaagaaaagtgctgctttagttcaatcttgcgttcgtcatgaaattgatttagtctggactgaacgcttttgatcctctcttccgtccggcttcaatgtgctccgtttccaacatccctgaaagacgaaaaacacctcctctccgggggagtctcgtcaaatgggagtacacgaatacggtttccaaaataactctcagcgtgtgtcttgctgatgccggtattgtccgcgtaacgtatttccccggagcggtgccggaagacgagccgagttatgccgtaaaccccggatattccgcgccgggagcggaaatccgcgagtatgatgaggacggggttcatgtcgttgagacgtccctgctccgcatccgcattcgcacggaggagcaaaaggtggatttttacgatgttgctacggatgagcccctgctgacggatgagggcggattcggccgggagagcaaggactggactggagacgcccgggtatggatacggaaaaatcttcaggaaacggagcattttttcgggcttggggacaagccgtgcgccttgaacctgaggggcaagtatttctccatgtggggagcggaccattatgatttccatgaggagtcggatcccctttacaaaagtattccctttttcctcagtttgcgggaaaggaaggcgtacggcctgttgtttgacaacacgtgccgttcgtatttcgacttcggagctacggatgaaaaggttctttccttcgggtccttcgggggcctgatgaattattatttcatttacaacaacactcctctggacatcatctccgcttatacgcgccttaccggtacgcctgaattgccgcctttgtgggcgctggggtaccaccagtccaagtggagctattatccggacaaggccgtatacaatctggtggagcgtttccggggcttgggcattccgtgcgatgccgtgcatctggaccatcattacatggaacggaaggagggatttacttgggacaaacagaattttcccgacgcggaaggaatggtccgcgccctggagaaggacggtgtgaagacggttctgattgtcaatcccggcgtgaaggtcaatcccgccaatccggtctggaaagaggggatggaacgcaattatttctgccgccggtcggaaggcaatttattgtcggaagaagtatggccgggactttgcaatttcccggattttacggctcccgccgtacgcggatggtgggcggatctgttcagcagggatattgggaaaattggcgtgcgcggcctctggaacgacatgaacgaacctgtcgtttttccgaaccgcactttcccgatggatacgcggcatgaatatgacggcatgccctgttcccatgaaaaggcccataatatttacgggcagtgcatggcggaagcctcctggctgggcatgaagcgtcacgctccggaccggcgccccttcctgctgtcccgatccggttttgccggattgcagcgctttgccgccacatggacaggggacaaccggtccagctgggaacatttgaagctggccaatttccagtgccagcggcttgcggcttccggcatttcctttgcgggagcggatgctgggggattcatggggcatcccacgccggaattgttttgccgctggatgcagatggcttctttccacggttttttccgcaatcattcctccggggagttcggcggtcaggagccatgggtttttgggcaggaagtcacctcttacgtgaaagccgccatagagggccgctaccgtctgcttccctatatctacacgcagttccaccggtacgcggagacgggcatgcccgtgctgcgctccctggccctgcaatgttttaccaacaaggacacctactggcggggggcggagtatttcttcggagaccatctgtacgtcattcccattcatgagccgcaggaaggcgggcggtttctctacattccggagggcgtctggtattcctaccacacggacagcctgatggaggacacaggaaaggatgtatgggtgaagtgccccctttctttcctgcccgtgtatgtccgcggaggggcggtaattccccattggccggtgcagcaatacgtgggagaactgcttcggccgccgctgacgctggatgtatggtgggcgccggaaggggaggtggcttcccatttgtatgaagatgcaggggacggatatgcataccggaacggagaatgcgccgtgcatgggttcctttaccgcggcggctccaattccctggagctggattggaactgcgaaggggatccctgtgcgttccatgagtccgcagaggtggttttgcacggtttgcctgcgggtatttccgtcagtgcatgcatggacggcgtgccgtgctgcggcgtgatgagggaaggaagggtgtggaaaataccggtgaaggataaatttgacacgctttccgtctgctggccggaggaataatgttcttccattaagggatgaggcgtccggaggaactgtcatggaaggtggaaactgcgcctgaccgtatccctcttcagtttcagttcccgccattcatgcgtcagggtggaggaggccactacgccgcccccggtgcagagtgcgagcctctgcccctgccagtacagggagcggatgcctaccaggcagaaaaagtctccatcttccagaaacccgaacggggcgccgaagtgaagcggacagcggagacgtgaacgccagtcgtccagctgggcgagcgtgttttccgtgcggggctgggaacccagggcgggggtggggtggagcagccgtatccagtgggccggagtatgctgttcgtccgattccagtgtgaggtaagtgacgaagtggatcagggtgcccaggttcagcacgctgcgtgccgttctggtgacgctgccgaagggggacaggcgggaaagaatgctgcccgccacgatttcatgctcgcggatttccttgtcgtcgttgatgaaaaccccttcatcctccggacgggccgttcctgccagggccattgtctccaggctgcggccctgctggtggaacagtgtttccggagtgattccgcagaatccttcccgttccgtccaccaggcgtagggataatgggacggagagctgctgatggcccgcaggatgagttcccggggtgtgtgggggagcagcatttccccgaactgggggatcgccggaacgcttttcatcaattgcccggcagcgatttgctccatcatttccgcaaaaacctgcgcgtatgcgtccggagacggttccgcccaccggatttccggagcaggcggggggggattttcctccgccgggagagcatgaagggctgccggtattttccatggccgcgggtcgtccagccggaatgtatcaatataaaaggcggggccggaatccggcggttccgctgattcccggaaaggcccggttccgagaagaaggccgcgggaagggtgcttgatcagggctccggaagtcagcgtttttatgtccatgcgcaattcatgttaaaatgccgccgccgggaattccagctatttgaatgtttgtgaagtgcggaagaaacgggaatgacggttcagtgggcgcctccgtttttccagaatgtcccatggatggcatggacctgaaaaagggcattccccttcgtccctgacgctttttcctcctccgttgaaaaagcaggggatgacggcctttccctgcccggagcctgtaacggagaggaactccgcccctgtttcctggtgccgtgcgccatgtcacgtgcgttccccttttgaattgacggggaaaagcactcaagtaagctttaaagagcttccgaccctatgcagataatgaacagaccagcaccatcagcccccaccgccgatattccggtagaggccatgctggcagaggtgcggaagccgctgggacccgtttggtggagcgtgtttctcgccagcgcattgctggcggcgtggggcatagggtggagttcctggcgcattgccgcagagggtgtgggcgtgctgggggtgaataataacgtggtgtgggggctggacatcgtgcattttgttttctggataggcctggggcatgcgggcaccctgatttccgccgtcctgctgctgacgcgccagtcatggagaagcccgattgcgcgcggagcggaacagatgaccctgtgcgcggttatctgcgccgccgttttccctgtggtgcacgtagggcgtgtctggatggcgtggatggcttccccgttgccggaagtgagcggaatttggccggacatggcctctcctttgatgtgggatgtcatggctgtcagcacctattttcttctttccctgttgtactggtatatcggcctggtgccggatttcgcgttgctgagggattgctgcaaggggcgtctgaggcgccggtacgggtggctggcgctgggctggcagggaacggggcgccagtggcgcgcctatgaaaaggccagccttctttttgcggttattctgactcctctcgtggtatccgttcattccgtggtgagtttcgatttttccgtgactcaggtgccggggtggcacctgagcattttcccgccctatttcgtagggggggccatcctcagcggcatggcgatggttcagctgattctgctgggggtgagacgtctgatggcaagcagcggcgttcgcagggccgttactccggccattctggatttaagttcccggtttgtgctggccctgagcctggtgatgggagccatgtatttgtgggagcatctggcagccattctgaatggaggctctccggagccgtttccgggcagaaatcctgtgaatgccgtgttcctcatcgtcatggttgccgggaatgtggcgctgccccagttgttctggttccgctctctgcgaaccaaccgctgggtgatcgccgccgtggctctgggagtgcttgcgggcatgtggatggaacgtttctggattgtcgtgaattccctgaaggcatccctgctggctgccaacatcggagattatttccccagcgtgacggatttggccatgatggtcgggagcgtggggctgtttatggccctgtacatggcgctggtgcgtgtggctccattcttctccctgtgcgacgtgcgggaacagcaatccctgaacaaggagggcggggcatgaaaaagcccgtcatttccggctgggtgctttccttcggttcggagaaggcgctccttcaggccgtccgcgtgctggtgaaggaggaaaatctgcgctgggaggtttgcgcaccttatccctgcgccgctgttcgtcttgccaacaggcacgccgggaaggccgtgggagcaggcgtccggctgtgggccgcagcgggcggcgtctgcgggtttctggccgtggctctgtggctttactggacgcagttctgtgcggatccccttgtgacccagggcagggtccagggctgggacagctggcccgcatatgtccctcccctgtttgaaggaactttgctgggggccggattgctgaccgccgccggtttcctgaagggggctcttctcccgcagtggcacgactgggcgttcgagtgtgattttttcaggacggatgagcacgggaacggttacttcattctgctggaaggcgggagcgaaggccatgccgccgttttggctgaagccctgcatccggatgcccgcgagtacgttcatgggaaaggaggccgggcatgagaggaggcatcacggcggtagcagcccttgttctcctgggagcgctctggttcctggcaggggacgacgatggaagaaatgccgttccccgtttgtttgacaatatgaatgatcgtcctctggcggatgcccagcaggtggggatttcttctgccgccccggaccggaaaacgcgcgtttggcgcctccccgctccgtggcgcagtccctgggcatgaacggaacggtccgaaaacgggaggatgaccgggactcctttgctgcggaaggttcctatttttcctccggccgcatgcagggcggagaggaggattccatgcctctggaactgggcggcatctcccgcagccgcgacgtgctggcggaggggcgcgcgctttatctggcgcattgcgccgtttgccacggagaggacggaagcggacgcggaagcatggccgcttatgacacctatccgcaaataggccccttccgggatgaaaaatatgcttcctattcttccggaaaaatgttcaggagcattcggttggggcagggaaacatgcccgctttcggaaacattctcacggcgcgggaaatctggtgtctggtggcgtttatccgccatttgcaagcgccgccggaagaacctgccgttcaacaaaaggaacaacattcatgaacagcaatacatcttcaacaggcggggaacgccaggaccgtccgggattcggctgggccgggcgttccgctgccctttccctgtggatcatttccgttctattatggtgcgtgctgatgcgccagtcctttacggccatgccctgggacgacatgacggtagccggagaaaggttgcaggaattgagaaggccgttcgccgctgccggaatggccgtaggggtccttggctccagcctctgtctggggtgcctgttctggctctgcctgtcttcactgacgagttccggctggggcattgcgctgagaagggtgctggcggcgggttgctgggggtttttacccggtgttttggtattggccggaacggtcggctgcctgactaccgtgatttttccggaagcagcccgctactggggagtggcggatgttgcctctcccggcgtccagcccttcggcgttctggatttggctgacttctcatggtggaacccggcatggctgtacgtgcgcgtggggagtattgcggtgctttcctggagcatggcccaggtatgggaaacgctggttgcggaaaaaaatgtctggcagccttccttccgccggggctctgccgccttctgcatggttgtgacggtgatgatgctgggcctgctggggatggacatgctgggagggacgggaaaggtcgttctttccatgttccccgtatacatgattgcatatgttctgctggtgtccctggcattcgctgtgttgtctgccgtgttcctgaggcggctggacggagggaaagaactgccttggccccgcctgggcggcatgctgacggccatggttctggtgaaagcctatattgtgtattctcagtacatgattacctggtacgcctccattccggctgaaatgtccttttataacgcagccgcttcctccggctggtccggaatgtttgccgcggctcttgttcttcagcttctgctgcctttccttattttgctgttccccgcgttgagacgccggccgtccgcgttgggcgctgtatgcgccggggtgctgtttggctccctgctggaagcatgctggatgttcggccccggacttgggctggacccgtccgcatggaaggcatggcttccgcttgtcctgctcttgggagggatggccctgatctgctgtttttccttcctgggggcactgagcgtccgcagggtatttcccgaattatgatgaaccgtaccgccgccgttttttttctgttttcccgccgtccgggcgagtatctccccctgttctggctggcaggggctttcgtgctgggtttcctgtggtcgctggcgtacgcttccggtctggtggcggaggagcctttgccgtggccggccggccgcctcatgttcgcattctacggcatgctggtgtacggctgggccctccccgtcctgttttcctttgcggcgggaagcaggagccggtggatgaaacccgtagaatggctctggcatgcctgcgttgcgctggggttggcgactattgccgcgggaaatgggagcggcgtgctcctgatgccttttgactggtgggtttgcccggtttttgccttccttgccgcaggggcggcgtgcgtcgcatggttccgtccgtttccgtggactgtacggctgttgttcagttcctccgccgggtgtgtggccgcggccctttgggcgttgggacatacgcaggcattgtccatgaatggcctgctggatgtttccgccctgggaggaagcctgtcctgcgggctgatgtttgccgccctgggagcggcggcgctccgcctggatatggcgctggggagggcagccggaatcctgtccgtctggatggccctggtgctggcggcggctccggtgattggcgggctgggggggcttcagggggttcccgtgccgtggatgttggtggaggccggtaccgcctggttttggtgcgccgttcttcccgccgtcctggcggtggcgcgtttttggataaaatccggtacgaagaccggaatatgggtgaagaccggagtttccctgcttgccttgctggcggcatggaacgtgtttgttgtgggtgcgcctgagctgatgcagttttccctgtctgcatggcatgaaccggaattatggattctgctgggggccggagttttgatgatggcaggggggaaggcccccggacatttccctgtggcatggcggctgttgggcgcaggcgtctgcggcgtgcttctggcgtatgccgtgggcgtgcttgccgccctggatgtccaggcttttcctgaggcccgtcgcgcggagctgatgagcggctgggtgggcatggctgcctgcatccacgccgttgccatggctttttgcctggcgggcagcctctgcctgtggcggccagcgggagcggaagacggaggccgggagccttcccctccgtttttgctgcgtttcttcttcatttcagccgtagcggcggctttggcgctggcgacggctgcggccgttgttctgcatgctccgcctccggattccatggaggtcaggagacccgttcatgatgcggaaggttccggtatttatgccgcggaggggtgtgccctgtgccatacccagattatccggcgttccctgtccggaaaggactggcagacggcgattgaccgcggcacggatcctgatttcccctaccgggtcagtgaaccggaagacatggatgccgaattcaacagggaaggagcgccgcaggcgggggtggcggccataggcccggacctgagcaatgcggcggaatacgccgccgggaggctggaatatgaagacgccgtatccggcggcacgcgccgcgccgcgcaggtgcgggaatggctggccctgcatctttacaacccgcgggaaatgcagttcaacaaaccctggaccatgtgtccggccatgcccggactgtttgaggaacgcccggtggaagggaacgccccctccacggctgccctgcctgtccggatggaacggggccgggagctggtgccttccccgcgcggggagcgcctgttgaactacctggagtccctgcggagggtggaaccctccctgaagcgcgaccaaatccattccttcccggccctgtcccatattcacccggattatgccgcgcatcctcccgccgtggacatggaacgcctgaagaaggcccgcgccgccgccgtgatggaaaagggcaggggcgtgtacctttccaaatgcgccatctgccacggcaacgacggcatgggggacaaggtgacctatccgcccctggccgggtccgagtggctgaaggaaaagcctgatgtggaaatcgtcaggatcatcctccagggactgaccggacccatcacggtgaatggaaaggaatgggattccaccatgctgccgcccggcgtcacggattcccgcgacctggcgaacctgctcacattcctgcgccgccagttcggcggggtggagaaggcggcctatacgccggagcaggtggacgccatccgccgggagctgtgacgggagggcccccgattacaacgtttcatgctccttgccccgggaacggaaatggctgcaaatgccattctatgaatttagatgatacgtccgccctttctgcggacagaaacgttgtaatcggaacaaatgccagtgccgccaatggcacggacaaagttgtgataggttacctcttccaccagagacgaccggggtaccgttgtgggttccacgtccgtgggcaccaactccgccggaaccgccctgggggatcatattaaagtagggaattcctgcgtttccgtaggttcctggtccaatacggaccactgtcacatggggattgccctgggttatcagagtaatacgtccaatgaatcggagaagctccatacgaccacggcctattccttctgcgcgggcatgggttcccggatcgagggggaccttctgcataggcatcggcaggggggtatgtggaagacggctgcgggcacagcatcgtgcttggcggctattccaggtcggaagtgcccagcggcattatgatttccggcggccacgcgacggccacccggtgtggttcgtcagtccgggcgtcaccagcggggagatgatgctggccaggcaagcccttttagatttccacaacttcctctttcgtgatggcattgtaggccagtgttatccctccgaagccggaaccgggggccggaggattgcccgggtcaatgtcctttgccagcaaatccagcgggtataattccagtttggtgccgggggtgcagaaaaataccacgtcgggattgtccccggtctcgtccgttttaaaaccaagcttgtcccggtaaaattgcagggactttttcatgtctatgactccaaggcagatgccggttactctgttcatgttcttcttcatggaattggcaaatagcctgtttttctgtttaatgttttgcggagcctccgccaggaaaatgtgtttttcccggttttgttaacgtctggttttatggtgaaagaaacggagccgtccgcaggtagttaaggaaccttttcatgaatcttccttcctcccgcattccctggctggacaacatccgtgtttttgcctgtattctcgttattgccagccacatcgtggggcagttttttgtgtcgcctcctttcactccggacaatgaaacctttgcctggtcctccttttatacggtgctggtgcgggtctccatccccctgtttttcatgatttccggcgccctcctgctgcccgttcgggatacgacggggcaattcctgaaaaaacgcttcacccgcgtcctgttccccttcctgctgtggtctgcgttttatactgtttttccgtggagctatgaaacgctcacgggggacagctttcactccgtcttccccctctcacgggtcacgccggacctggaaaccatgggaacgaacctgctgctgattccactgaaattcagcgtgggcattcatctctggtacctctacgtgctgatgggcctttacctcttcctgccagtcatatccccctgggtggagaaagcgggaaaggcggcctttgcctacttcctgctactgtgggcgctcaccctcttgttcccttatctccagaccattttccccagctatctgggaaaatgcccctggaatgaatacggggccctgcattccttctccgggtacctgggctacatggtgctcggctgctttctgaggaaataccctgggaatgcctccttcgcccgcacggcctgctgggccgttccgtgtctggccgcggccttttggtttaccctccatttctaccggacgtccacggctcaggcctggtcctcaagcggcgactacatcggcttcgccagcattaatgtggcccttatgtccgtggccgttttcgttctcttccagtcacttcccgcgttcagagccgggtccgcgccgcggcgtttcctggctgatttctccagcatgagtttcggcatctacctggtccactttgtgctggtgggagccgtttaccgcctctttggcatgctccatctgttgttccttccggcttctctttccatcccgctgctgactgcggcgacgtgcctggcagcctggggaatcatcaagctgctctccttcctccccggcagcaggtacctgatcggataaattccggcatggagacaaaaaactgccctccgcaccgtgtggcgggagggcagtccggatggaaaaagcgggaaaaacagggatcagctcagggtttccaccagtttgtcgccgtaagcggagcaggtaagttccgtggaaccgggaatcatttccgcaaggtcgaacgtaaccgttttttcggaaatcacccggtcaatggcctgaatcagcagatcggcggcttccgtccagcccatgtagcgcaacatcatctccgcagacaggatgacggagctggggttggccttgttcagtccggccagtttcggcccggtgccgtgcgtagcttcaaaaatggaatgccccgtcaggtagttgatgttgcctccgggggcgattccgatgccgccgacttgcgccgccagggcgtcggagatgtaatccccgttcagattcagcgtggctaccacgtcgaagttttccggatggagcagaatttcctgaaggaaggcgtctgcaatgcaatccttgataacgataccgttgggaagtttcagccaggggccgtcccctatggggagggcgccgtattcccgccgtgcgacatcgtatccccagtcacggaagccgccttccgtgaatttcatgatgttgcccttatgcaccagcgtgacgcttttccttccgtttttcacggcatagtcaatggcggcgcgcaccaggcgctccgtgccttcacgggaaacgggcttgatgccgaagccggagctttccgggaaacgaacctttttcatgcggtccgggaaaatgcggctcatggtatcaaaaaacagcttggcatcctccgtgccttccttgaattcgattccggcgtagatgtcttccgtgttttcgcggaaaacgaccatgtccactttttccggagctttgacgggagtttcaatgccgttgaaatagcgcacgggacgcaggcagacaaacagatccagatcctgccgcagcgtgacgttcaggctgcggatgcctccgcccaccggagtggtgagggggcctttgatgccgatgaggtacgtgcggaaagcttccaccgtttcattcggaagccaggtgcccagattgtcaaaagatttctgcccggcaaaaacttcataccatgcgatggaacgcctgccctgataagccttggctacggctgcgtcaatgacacgggaggccgccgcccatatctcaggaccggttccatcaccgatgatgaagggaatgacgggcctgtccggaacgcaaagcctgccgttctgcatggtgacggctgcaccgtccgcgggaggggtgaatgttaaattggtcatgacgtgcgttcctttataggacgcaacccggtttggcaagataaaagagcggaatggggaactgcgcttctggagctttgctagctcctgaagcaaccggccttgaaaatgttttcctcatcccgcagcgcgtgtctcagaaccagcggtccttcccggaaggttcttccggccgactggcttcttcccggaggcgtttgaggaaattttcttcagcctggtgtttcaagccgctctccatgatatgcttccgggcgttttcgttcagctggttgacggcaatggcggcatcttcggaagtcagcctgttccagatgccggcgtcatccttcacgattcgcagggaaccctccaccatctcacaggaaatcagcttgccatgaaggccctctgccgtaatggggcctttgtttcctgcgggaatgataatccgaagaggttcgggcccttccagattgatgcccccgtgggcgcggtaggccgctttcagaatcagcgttttcctgctccaccaccaggtggtggagtaacggtattcatattcaaaagtctgttccactgttaccagattgaccactttttcatccttctgcacaatcagggccacgccgccgtggttggaggaaaaacccttattgatcagggtgaggcccgcttccctgccagcttcaatcagtttttccgctacagccatcggcttttccgccggggcggtgatgcaggtgcgcacgccccagaacaatacggccagcacacctatcagaacggcacccctggccagcgcgacaacggcgggggaatggaaaaaagtgggggaggatccgctcatgagatgttgtgcgtggcggaaattcagggttccgggtctttatgggagccatgttccctgatggggggcatgaacagggccaggaaggtgaaggcgatgacggtcaggtcatctatctgtcctactcccggaatgaaatccggaatcaggtcaatgggggaaaaggcataaagagccgtcagagccaggaggacaagcttgcgtctggtgaacagtcgcggttctccttcccggctgcggaagtaattgatggccctgaccagaagctgctgcctggagccgttgggcggaatgggaatcttgtttttcatggagatgcaggggtgaatttaccgtcaatggaaaggaaactcttttttatatgaaccggaagcagacccggaggcgggataacggcccccttcgtcctgccttgtcccggcaacggcacgggaagggatttttttgaagccgttttctgtaggcgtcttttcatcaggaaagctctttccttattgtctcatgcactcccggccgcgtccagagcaattcccggcttcttccgggaatgagcttccttgcatttgagagagagtataacgtttacggcagttgcgccgtgcatgtatttccttttcctggcattatcatcggcaagggaagagggcaagtgccggaaagcgcggaaggaaccgtaatatttgttttgtccctgccgttttccgagcctgttttcccccagccacaaaaacgttccgcagggtagaggagggcttcttccccattggcctgcgttcccttcccggcagaggtccgcttgggcttgcggcattgacacggagggaggcacggggtactctcctgcggcatataatgatcagttttaccaatatcagcggggccgaggaaattggggccaattgctatttgcttgagatggacggcaccaggattgtgcttgacagcgggatgcaccccaagaaggaggggaaggcggccatgccggattttgattccctggaacccaattccgtggaagccgtttttttaagccattcccacctggaccatctgggaacgctgcctgtgcttcaggagaaacagccagcggcggaggtgttcatgacgcccgccgcggcagccctgtctgaagtgatgctgcataattccgtgaatgtgatgagcgccaagaggctggacctgggcattgtggagtatccttttttcacccataatgatctggacagattgagcgacgcctggcatgccaagtcctgcaatgaagtgtttcgcgtgggcttccgccagaacgtgctggccacgttttacgatgccgggcacatcctggggtctgccggcgtgatgctggagggtgagagcggccataccgtattttatacgggggacgtgcagtttgaagaccagagcatgattcctggggctgattttccggaatccggcgtagatacactggttatggagtgcacgcgcggcggtttccagcgtagcgcccactattcccggccggaagagatggtgaggttcgggaaagcgattgcggagacgctggaacgcggcggcgccgtactgattccggtattcgccatcggcaagagccaggagatgctgttcaacattcaccgtttcaagcagcagggggtgattcccgccaatactcccgtgtacttcggcgggctgagcgcgaaagtttccctgttgtacgaccgttttgccgggctgacgcgcaggcatgaccatgaattcaagctgaaggaggagattcagaccgtgccccttccgcgcaagggaaaagctccgctggtgtgttccccggggaatatttatgtggtgtccagcggcatgatgacggaaaatacgctttccaacgtcatggcggagcaggttcttccccaggagaagaatgctattttgttcgtaggatatgcggatcctgattctccggcgggactgctgaaggcaactcctgaaggggaactggtgaaaatgaggcccaacgggcagccggtgcgccgcaagtgcaccgtggactgttttgatttttccgggcatgccacccgggactccctggttaattatgccgtgaagctgaaccccaggcaggtggttctggtgcacggggacccggacgccgtggagtggatgcagcacacgctatccgccaaaatgcctgattccaccatcgtcgttcctgagccgggacgtcgctacactttcgagccatgagttttaccggagagagaaaggggaggctgatcgtctttgaaggcattgacggcacgggcaagtccacccacatcggccacttgcggaagtatttggaggggaaggggctggaagtggtgcagagttttgaacccacacgcggacggtggggccggatgctccgggactccgccgtgaccggacgcctttccgtagaggaggaagtagccctgttcctgaaagacaggagggaacatgtggagatgctgattgctcccgcattggcgcggggggcatgggttctgctggatcgctactatctttccatgatggcttaccagggcgcgcgtggcatagatccggaggttatccgcgccgccaatgaagaatttgccccggtgccggatgccgtggtctggctggacattcccgtttccgtggcgctggaacgcattgggaaccgcggggaacgcgacgcttttgaaacggaagcgggcctggcggcctgccgcagcgtgtttgcatccgtccatgctccctggatgttccgcatagacgcggatgccgggaaggaagaggtggcggcaagagtgcggaaggctctttccgtgcgtttccccgatgtcattggggcataggcatctcctttcggccataggccggggatttttccttagcgtttcattcctggcatttggatgctattccgcaggcgcataagccgttggatccggaatcccggcttccctgaaggcttcccggcgttccatgcaggtggaacagacgccgcagtggacggctccgcccttgtagcaggaataggtgcgggaaaagtccacgcccaaatcctggcccatggcggcgatgccgcccttggacatgtggatgaaagggcgcaggatgcccaggccggcataggttcccaggcgaatggcttctgtcatggcggccatgaattcctcccggcagtccggatagatgctatggtccccggaatgggccgcaatgacgagctgctgcgccccgcagctttccgcaactccggcggcgattgacaggaagatgccgttgcggaaggggacgacggtctgtttcatcagttcttcatcataggaaccgtccggaatatcgtccgcgccggagaggagggctgatttcaaatgggaggagatggaggaaatgtcaatcacgcggtgttctatgcccagactggcggcctgccaggcagcgcatttcagctctcgttccgcgtggttggaggcatagtcaaagctgagggccacccggacgcggtggttccggtgggcccagtgcagggctacgctggagtccaatcccccgctgagcagtacggctgtttccattttgtccatggtctggattacagggggcggttttccggattgtgttcggctgttgcggtcagctggatgccgccgcggggggagaagcggccttccaccttcagccaccgcggggaaatggcggccaccagatcatccgtgatgcggttgacgatttgttcattaaaagccgggtagttgcggtaggaggccaggtagtatttgagagatttggtttccacgcacttttctgccggaacgtaggtgatcgtcaggtgacaggaatccggttgaccggtaacggggcagagggaggaaaattcatgggtatccagcgtgatggtgtaggggcgcgtgccgcggttggggaaggattccagcctggcgtcgtcggggttggtaaagaaggagctttgagagcctaatagagtcagatggtcgtcggacatggttgttgtagtatggtaatggatgttcaggttccctggacgggggctccgccggggaattctttcacgtacaggtcctgttgagggaatgggatggaaatgccgtgttcgttgaacgcatgatagatgtgttctcgcacggaggaaaggctggaggactttgtcatgacgggaacccagacccatacgcccagattgacggcactgtctccgaaactgtccagcaccacgctggttttcttgactttggaaaggaagggcagggttgccagcgtttccagaatgattttgcgcgccctttccacgtccgtcccgtaggaaatgcccacttccaccttcacgcattcgaatttgtggttgcgggtcatgttgcggaagttcttgttgaaaagctgggagttctggaaggcgatgatagagccgtccagcgtctcaatcatggtggagcggtagcccagggaggagacgcggccccggtagccgtcgcattcaatcatgtcgccctggcgcaggcgacccagcattagggagaggccgctgatgatgttttcaatggtgtctttcagggcgaagccgatgcccatgctcaagccccccatgaccatcagcagcccgttgtagttggcgttcatgatgataagcgccgtaaaaacgaagagcccccagagaaaaagggtggagagtgtcacgaaggtggggatgatgcctacttcataatcttctccatagatttcatgcagcgtatttttccctaagaatatcaagtagttgagaacaatagcaatcaggatgaccgtgatgacgctgctccagctgaaagtgagcagatccttgatttccgtggttgcgaaaatcttattgatgatgaggtcccccatgtcgaaggtggcggcgggccagatgatgctgaacaggatgaggaaaatggtcaggcagggaagcagcagcttggagatgaaggggcggaaccacaggatagccctcttgttccgttccttccggcggttttcataatggtggagcagatcccacagccccaccagcagcaggatgctggtcatcagcatgatccaggtcatcagcaccaggaaggccatgaagctgaatccagtccagcacaggacgctgcccaggatggtgaataccagagatacggtggagaaaaaacggtccagccggggcagcttgtgcctctgccgcacccaggtcagcagggagaagagggaaaccagcgtgaacaggatgggcatggaaatgtccacgatgatgttgggggccatgaacatgcgcagtagcatgaagaatccgcccaaaagcagatagggcatgtagatgcggatgccggagttaatggtgccgtacggaaggcgcgtgaccagggagaacaggatggcgctgaccagaagaaggaattccgcgcccagggaggccgcgctttccagcaggtagttcggcgtgcgcagtgaggcaatgacgagggtcagcgccacgataaggatagtggtgacgttggcgaaagcatggcgtttgttgtaatgccccgtctttttcaatgtatttcggaagcccaggaagatgatgatgcgggagaggcagtaggagcacaggataattcccagcaggataagtccgtaatgcttgagcgtttccgggtctgacggaagctggagcttgctgtccgcggatgtttcccaagcccccatgcacgtttcatacgtcttgtgcggtttgagaaagatgtaccgggccgcgtgggacggcgtgtagaagaccctgttaaacagggcggtgaacagtttggcgctttcattgttgagcgcgtctatttttccgttcaggctgctgaaaagttccttgaggtagctgatttgctccttttcactttggagggattcttccagctcctggcaggcatacagggcttcgtcccgctgaacaagggaggcttgcgacagggtgtccgtatttacttcctccagggatgccgccagttttttaatgcgttctatttccttgtccagccgttcctcctgcccctggaaatccggtttttgggcgtaatacgttttcaccaggctggaagcggccttacagtaaaaggccagcgtaaatattttctggtcgtccagcgcgtaaagcacagcggacatttcatacaccctggtgtcaaaataattataggtagcatccgcttccctcaccagcgttttccggatgaccatccttttttcctcattctttttcagaatggtgatttcatggcacagagccatgattacggtatccatttccgattggtccggctgctcctgaggctgttccgccttggcttcctccgcctgttccggagcggcggcaggcggaaccgcctgctgtgcagatgcagaacctgcggccagaacccccgccaggaaaaaggcggcgcagcggcggaaaaagatccggtaatcagggatgctcatgaatggtccctgttctaggggctacgggcattacggtcaaggttatatattctcctgctgacggagggtgagcttcacagaaaaaaacttttttcaacgtgaaccgtatggaaaggacagggcatcttccggcatcatttcccaaatccccggaagatgcccttccgtaaacaggaaacgcaccggagaatttccggtgcgtttgaaaagatgaatactccggcgggaatcagtccagagaaaaggaacggattctccttacggtttcctcccggcccagcagggaaaagacggaggaaaggtccgggccgccgcttaacccggtgagggccacccgggacgggaacatcacggctcccatttttacgccgttttccttggcaaaggctttcagcacgccaatgagttcatgtccatcccattccggttcctgttccagcctgtccgccagtttgaaaagcagttccagggcttccggctgaactttggagacggcttccggatccatgcccaggtcaaaaaagaaacggattttatccgggacttccgccagggtctgtacctttgtttgcacggtggcgatggcggcgtccagaatcggggaatccggcaggccggctttcaaacagaaggggcgtgcccggagggcgaattcttccgcaggcagggcgatgatgtgctgctggttgacccagcggcatttggtgatatcgaatttggcggcggagtggttcacggcttccagagagaagcgtccgatcagctcctgcggggagaaaatttccgtatcgtccttgggagaccagcccagcagggccagaaagttcatgacgccttccggcagaaagccttcttccgggtaggttcccagggcggcgcccacgtcgcgcttggacattttggagccgtcctggttcaaaatcagcggcatgtgggcgaaaacagggggagtgacgccgaaggcctcaaacagctggatgtgcttgggcgtgttcatgatgtggtcttccccgcgaatgacatgggtcatcttcatctcaatatcgtccaccacgttgacaaagtggaagatgtaggaaccgtccgcgcggcggatagccatgtccggggtgttggaggcgtcccggtagtcgatggtgatgtttccgcaaatcaggtcatggaaggtgacgggtttggagcggtcaaagcggaaacgccaggctccttcatcctcgtacacgcggtaggcgtcctggagcttcttgaaataggcgtcgtaaatatcgtttcgctggctttggaaataggggccgcaatcgccgcccttcatgggcccctcatcccagtccagccccagccattccatgccggtgaagattgcgcgggtagcctcctccgtattgcgggcattatccgtatcttcaatgcggaggataaaggttccccccatcttgcgggcaaacagccagttgaacagggcggtgcgggcgcccccgatgtgaaggtagcccgtgggggaaggtgcaaatcttgttctgacgagactcatgatgggtaagagagtaagggcctgtctgcccgcgtcaagcagatacagggggtgcatgccaaaaaacggggatgcggaagcagtggattttttaggacgttgtcggccttgcggcttgcgtggagagggcttttaggcttcatttaacgccgtgttctttttaaaacacatattccgtctgcgggagaagtggcagattaaaagggaagatgaggaaaagccctttctggagcatctggacgacctgcggaccatgctgctgaggatggctctgtgcctgaccgtcagcacaattctgtgcgccgggtttgcgtccaatctgatggacatcctgaggcgtcccgtcaaccaggtgtgggatatgtttgaagaatcccatcttccggcagggattggtctggatgcctggggtaaggccaaggaaatggcaacggccatgacgagcctgggagattcccagcgggcattgtttctccgccaggtttccccgtcccaggcagatttgacggaggctgccctggtgcttcgcggcgcgcagccgctgccggaggacaggaagcaggttttcatcagggaaggcagcccctccacggccgtgagggatctggcggaagccctgtattccaaaggagccgtgctggcagacggaacggggcggggggccctcaagatgatgagcgcgttccagcccggggaggcgtttatgctgaccatcaagctttccctgtatgccggagtggtcatttccttcccgcttctgttgtacttcctgctgcaattcatcattccggggctgctggaacatgaacgcaagctgctgtacaagtgcatggctgtcggcttcggtctcttcctggccgggacgctgttttgttacttcatcgtcctcccgcgggtattgacgtttttttacacctattccctggaattcggcatctccaatgaatggcgcatcggctactacctgtccttcgctacgcagatgattttaatgtttggactggcttttgaattgcctgtggtagtgatgcccttcgtcaagctgggggtgctgacctatgacatgatgaagtccacgagacgctatgccattgtggctatcgccgtcctggccgcggttatcacccctacgccggatgtagctactatgatgctgatggccgttcccatgtatgcgctgtatgaaatatgcatcattctggcctggatgcatgaacgcaaggaggccgcgcgcacccgggaggaaatcgcccggtttgaagaagatttcaacaacaacaattctccctacaaccagtaaatacatccaacccacgccaatatcatgaaccttctggaaattattatcctgggcattgtggaaggcctgaccgaatatctgccggtcagctccacgggccacctgctcctgacggaatccctgctgaacatgtcccagagcaaggaagctctggatgccctggccgtctgcatccaggggggagccatcctggcggtgctgagcctgtattttccgcgggtaaaggccatggcgcagggcgtgcgcggcaataatcccgccgggctgaaactgctggtcaacctcattctggccttccttcccgccgctgtggtgggcctgtgctgcgcttcactgattaaggaatatctgttcaacacatatacggtggcttattcatggatcgtagggggaggcgttattctggcgtattgcgcctggcgcgccagggagggccgttccaatgaaggggactccggcgcctccattgaaagcctgacgccggccaaggcgctgacggtgggcgcactccagtgcgtggccatgatccccggcaccagccggagcctgatgaccatgctgggaggcatgttcgtggggttgagcgtggaagcggccgtggagttcagctttttgctgggattgattaccctgggcgcggccacggtccatgatgcgtataaggacggagctctgatgctggaatcctttgggtgggaagcccttgccgtgggaacggcggtcagctggctttccgcatggctggctgtaaaatggatggtatcctatctgcaaaggcacagtttttccgtattcggatggtaccgcatcgccattggtatcgtgacgctggttctcctgtccatggggctggtgcattgaaaaacggattccggcattcaagcaccggaaaacgtttttctccggcgaggcggttctctcccgcagcgggaagcgggttttgaacaatcccggagaaggatggccgctgcctggacgaagccatgacacagggctgttttgcatccccggaacaaaacagccctgcgatgaatagcggttcaggaaaacttatctcctgtgcgttccgtgggaattcccgggattggagggtttcggtgaaggggatggacgggatggcgcagatgaatgaggggaggacggcctgctgggtgcgctggcggaatggggcggggaagaaggccgggaaacgggagagggcctgccgggacggttgatgccggagtggcctggattgggggaggaaggccttgaagacggcagggtggaagggcggctgggacgtccgaaatccggtctggagggacgattgccttccgggcggttgatgacggggcgattcgtgccgccgggacgggaaggattattggcggaagggtgagaaggccgtccgggctggttgattcccggatgatgtactggtggccgctgtaaattaccgggttttccaaagtccggccgttgattgggccgtccgggctgagggaccggcctgttgtttcccggacggaaatggtcaggcctgaagtggggtttcatcggcggttttgccatggggcggcagttatggggacggacataatgcccgcggtaatagggagccggcccccacgtgggaatatagtaattcggacggatcaggttgatggagtaaatgggtcttccgaacgtgtcgtaggcataaatgggtcttcctccataatatccgtaaatggggtagccggagctgtcatacatgtacgacacgccggaacctccactgctgtaggagcctgacacgctgaaattgtcataataaggatcgtagcagccggacaaagcgcatccgatagcggccgccagcagtgagttttttaagataacgtatgctttcatgatgacgaaacagggcggattatattttccctttgcctgaaaagcggcaaggaaaaagtacatttgtttaaaattattttgcttggaaacgcacttcctgttgtcttagactgcaaaaacgttctacgcgatgggaattcttcttcaaaataaaaaagtcggcctggctctgctgtgcgataacgccccttatacgctggccatgactctggcttcctatggcaggtccgggctgcttggctattttgacgaagcatgcgccgtttttccggaaagcgccgtcaaggtgcgggagacggccctttcccatgggctttccgcggtggccgccccggtggaaggcggttttataggagccctccatacggcagtcaacgctcttgatacggattacgtgctgctggcggaggatgactgcatgatctgggaacacctgcgcggggaaaacctggaaaagcagttgaaacgggcattggacctgctgatttccggacaggcggatatggtgcgcctgcgccatgcatggcgcggttgcacgcgctataaggccgcttatacatattcctacttttatcccgtggaacagctggccaccatgtgggtgcatgcggaaggtttgtcggaagcgccggattggattaaaagcatccggcgcttcttccaccctctccgctccaagcgttcgataggccgttgcgtttatgtggagcagaacccgcatcttcgctttccccagtacattaccaagattgatgaaggctatattattgacagcgaggttttccagtggaccaaccagcctacgctcatcgcacgttccagaatcaggcagattctgacggggctggagcagatgtccggctccatcgggaaattgccgcaggattttgaacatgccgtcaatagcccgcgatggaggaacgcccatatgaacataggcgtcatcaggggaattttcacttaaatgcgtatggaaaacggcggaaaagcggtgcggtatgaatgcaccagatgcggcgcgtgctgccgctgggccggggatgtgtgcattgagacggatgaaatccgcgagatttcccgtttcctggacatggacgaacaggtttttattgacacatgctgccggttgagagccaaccggcgcggattgtccatccgggacgcggaagacggcgcctgcatgatgctgacgaaagacggctgccggatcaatcccgttaaaccccgccagtgccgggattttcccaacaaatggaattttcccggctggcgggatttgtgccgcgccagagaagtgggagaggaacgggaagcataatatggccggaatgccgcaagattcttttctgcttccggcattattccatggacggggtgaaatccggctggaatcttgcgttttttacaggaactgagccagatcccgttcaaaaccgggataggacgtattgatgcattccgcatccgtcactacggtttctccctgtgcgctgagtccggccaccaggaagctcatggcgatgcggtggtccccataactggataattccgttcccttcaggggagtgccgccgtgaacaaccatgccatcgtcaaattcttccacatccacgcccatgagccggaggttggccgccgtggtggcgatgcggtccgtttccttgacgcgtaattcgcgggcgtttcggacgatgaagtctccccggcccagggctcccgctacggccaggatgggtatctcgtcaatgaggttgggtatttcttccgggaggaggctggtgccgtgcagggaatccgagccgtacacggtaatatcgccgtatggttcgcaagcatcttccggagaagtgggcacgatgtccattcgcgcgcccatccgctgcagagcgctgatgacggcgttccgcgtcttgttcagccctacctggcgcaacgtcaggcgggaacccggacggctggcggcggccaccatccagaaggctgcggaggaaatatctgccgggactgtcaaatcatgggcgacggggagagccggcccgcaggttccgacggtaagtccatccacggtgcagggaacgccgaaatggcggaacaggcgttctgtatggtcgcgggtgacggccggctggcgcacggtggtggttccgtccgcaaacatgcccgccaatagaatggcgcttttaacctgggcgctggccatgggaagcgtgtaggaaatggggtgcacccgcccgccgtgaatgctcagcggagcacagcccggtttggctccccgggcttcaatccgcgctcccatctgttccagaggctgcatgatgcggcccatggggcgggagctcagggaagcgtccccaaacatttccgaatcaaaggggcaggcggccagcatcccggccagcagcctcatgcccgtgccggaattaccgcagtcaatgggccgttcaggagccttggggctcatggcgacgcccgtaattcggaagcggacggggccgtatccctgccgttcttccagcacatccactttggcgcccagctgctccatggcgcgcagggtattcaggcaatcttcgctgcatagaaaattatccacttccgtcactccttccgccaggcctcccagaatggcggcgcggtgggaaatgcttttgtctccgggcacggtcagtgccccttgcaaggaggaaatggaatgggaatgaagattcatgagtttccggaagaactaccctgtatcggatgcagaatcaagccaattacgagacgggcggaggcatcagggggcattccagaatggagttgattttccgggacggtggcgtatattcatgtgcgttatcggctgcatccccctgaaaagaaggagagagcttttcaggatcaatggatcaagctggttttcataggtagtaagttggagcggccacgggagcagtcctgtggccgctttaccttgttcagggaagagggcgcccatggcttgaagaaggaagcggaaggaagaaagaaacaaaatgctttccatgtctgctttgggctttaccgcgagccgatgaaagcgtatgtagtccatgccgatcaggttcgggtggtcgctgttccggtctccggaccggagtagaggaaagtccggacatcacaaggcagcgtgtcccgtgaaagcgggagacgggaatctcccaagggttcccggacggaaagtgccacagaaaacaaaccgcccggatggggttcgcccccatgccgggcaagggtgaaaaggggaggtaagagctcaccgctccgagggtgaccaaggaggcatggtaaaccccgcgcgatgcaagacaaacaggggaagggtcgcctgcccgccggatccccgggtattagtcgcatccgtttcgtgaaagcgaacgggcgcgcggaacgcctgactgcggtccgcgtgagaaaaatgaccgcacagtcggctctggtaagcggacaaaatctggcttacagaacctggtcggctcctgctttttaccatgccattttcctcccctcttttcgggggaagagaaacatccgggaatttgtcccgttccgggggctctttggggttgcatgggcgttttaaatgtgtagaatccgtcacctaattgcaacccactatggagaagcttgtcgtacatggaggttttacgctgaggggagccgtcaatatcagcgggtccaaaaatgcctccctgcctattttggccgcatccctgctgacggatgagcctgtagtggtgcgccgggttccggatgtttccgataccaatttcatggtgcagatcatgggccagctgggagcctccgtggagcggtccagcggcaatgtgcgcgtggaagccaggaacctgcattccgaagccgcttatgaacaggtacgcaagatgcgcgcctccatttgcctgatggggcccttgatggcccgcatgcagcggtgcgtgattcccctgccgggcggctgcgtgattggcgaccgtcctgtggatctgcatatcagggccatccaggcattgggggcacaggtgcagattgagcgcggcaacctgattattgaagctcccaaggggttgaaaggagccacggtggatttgagcggcgaccacggccccaccgttctgggaacggacaacctgatgatggccgccgtattggcggaaggcaccaccgttattgaatccgccgcctccgagccggaagtggtggatctggcgaactttttaaccaagatgggcgccaatattcaaggtgcgggaacgcgccggatcgtcattgagggagtggaaaagctccgcggctgcaaccataccgttatcccggaccgcattgaggccggtacctttatggtggcggcggccatgatgggggatggcgtgaccctgcggcgcgtgtgtgaggaacacatgactgtggtgacggatttgctccggaagtgcggccaccacgtggaattcaacgagcggggggatacggtcaccatcattgccggaaaaacgcccaaatgcggggaaatcaagacagccccgtatcccggctaccccacggacatgcaggcccagatgacggctctcttcgccaccacgccgggcatctccgtggtgaaggatactattttcccgcagcgtttcatgcactgctccgaactcaagcgcatgggggcggacatcaaggtggacaacggcaccgccgtcatttccggggtggaaacgctcagcggcgctcccgtcatggcctccgacctgcgggcctccgccgccctggttctggcagccctgaaggcggaaggcactacggaaatccaccgcctgtaccatattgaccggggctatgaaatgattgacgaaaaactcctggccatcggcgctgcagtggaaaggctgccggatgacgacaattaacgccgttttaggtcctgattttactccacaccgcattttttctttactgtcagggttccatatgctattcaccgaagtcctatgaacaaggctcaactgatcgaactgattcaaagcaagctgggtgctgatacgaccaagaagcacgctgaagaagctctggccgctgtgctggaatccatcaaggaaggcgtgaaggaatccggcaaggtgcagatcattggctttggtacgtttgctaccaagacccgtgaagcccgtaccggccgcaacccgaagaccggcaacacgatcaatattcccgcctccaagacggttgctttcaaggcctcttccgccttgaaggactaagacggcaactccttctcaagggagtacttttctttcagcacccccgtcctttgaggacaggggtgttttttatgtcccggtgcggatgcacacggcttgaccgggtgaacgccgccgtctagaataccgccatgtccagcagttttggtcaggtgttcagaatttctacctggggtgaatcccatgggactggggtaggcgtggtgattgatggttgcccgtccctcgtcccggtgacggaagaagacattcagcgggagctggaccggcgcaggccggggcagagcgacatcgtaaccccccgcagggaggaagaccgcgcggaaatcctttccggagtgctggacggcaaaaccctgggaacgcctatcgccatcagtgtccggaacaaggaccaccgctcttccgcctatgacgagatggccagaacgtaccggccctcccacgcggactatacatacgacgctaaatacggcattcgcgcctgggcgggcggtggccgggcctccgcacgggaaaccatcggccgcgtcgcagccggagcggtggccagggccgtgctgaagcaggctttccccgatatggaggtcgtggcctgggtggatcaggttcaccatgtgaaagcttccgtggactggggtgccgtgacggcctctgccattgagagcaacatcgtccgtacggcggacccctccgctgcggaagccatgatcgctgccatcaaggaagctcgtgactccggaaactccttgggcggcgtggtcaaatgcgtggtgcgcggctgccctcccggactgggtgatccggtttttgacaagctggacgctacgcttgcccacgccatgatgagcattcccgccaccaaggctttcgccgtgggttccggttttgaagcggcggacatgaccggcttggaacataatgaccctttttacatgcagggctgccgggtgcgtactaccaccaaccactccggcggtattcagggcggcatctccaacggagaggacattctgatgcgcatcggcttcaagcctacggccaccttgatgattgaccagcagacggtcaacagggacggggaggatgcccggctcaagggcaggggacggcatgatgcctgcgtactgccgcgcgccgtgcccattgtggaggctatggcctggctctgcctgtgcgaccactacctgcgccaacgctgccagagggctctgtaacaaccggtttcacggcttcttttcccctcattcatggattcctccctcacattttacctggttctgggcgcattgctgctgggtttcattgtactcggcatgctgaaggggatgattaagatgctcctgttcggcgcggcagtgctctcttccgtagccgcttacttctggctatccaaatacggtttcacctacctctctttcatcaccagcgacccgcgggaatggatggtcacggtgctgtccgtcggaggcgcggcggctgtcttctttgtctttatgcacggtctcttctggttcagcgacgtcttctcctggggacggcgcatgggcttcggcggggccaagggaatcgtcacgacggtactgatggcggcagtcgtatgctgggtgggagtcatgtgcatcttcttttacggctccatggcggaaatgacccgcgcccgagaactggccctgtaccacatggaccccaaccgcaccatttccttacctgccatttattccatcaaaaagtccatcatggacaacccccacctgagctggctggaaaaaatatctccggagcatgatccggaacggctttccctggcaaaaatgatcgcctacctggtgacgctcagtccagagctctccgaccagcggcgcacccagctggactgctatatgccccgttcccgcattaccagccgcgtgctaagcctgaaaagcctgagcgaagaccccgccatccgccttctggtgcagaagggggatatgcagggcttatataatgatgtcaagctgacccgctttctggaagaccacgatgtccgttccgtcctgtcccaactggatgttgatcgtgtgctgggctttgtcacggaaattcgtcggacggccccagccggaaatgaatacattcccgaagccacgccaattgagtgataagcgcggattttttgttccgccggagtggattcgttccttttatccgcctttaattcaagaaaaaatcagggagttatccccccccttgcgcccgaaccggaaaaagagagtttctgcttttttcaggaaaaagcgcttcctccaggcgttcgtcccggaagaagcgctcttttgaggataaggtattgcaaaccttgaaaaaacatcaggagagtttttccgcgatggcatccacccattccgggaaggtatcatcatggtctccattggaaagcactaccggcagaagcctttgcgctttcaaacgttccaggaaggaatcgaagtccttgccagcctggcagaagttttcgtaaaattcatctccaagggcaaaaacggcgtagcttacctcggacaaatcttccgaagagtccttcaattcctgatggagtgcctctgcgttggtgggaggttctccgtccccccacgtactggtgatgaccagaagcgttcccgcattcttcaactgttccaccgtcataccttccatgtcaaccacctttgcctgatggccgagcttggtcaattttgcccgtgcgtcctgggccagactctccgaattgccggtttccgttccgtagataatagtgatttccatgcgttctgatgattggtttgacaacgaaagttagattaaactaattaaacagacaaggcaaaacagcaggacgacggctgaatttttcttccttgtttatccttcagggtaactggttttccggaaaattctccgataccatactactctcgtttgattatcaaagtattcggatgctgtggaaaggtgaagcaccagccgaaaaggcgcgcaaaacggtagtataatcccttgcggcaggaattctggctggtcatgatatcgtaaaaagccaggtcaatctggcttctggaaatgggggctccattcattttggcgtgcagcatggcgtcgtggaacagggaagggaggagcatatccggaggagtggccccccaggtgacgccgtcccagccatagccggaagtaatgctgaaacgaccgccctccgcctgcatgcgtatggatgggtcatatacgctgacggctgtccagcggccaaaatccatcctttttcttccgctggtccagctgatggcatttttagtgatgtagaaaggcttgtcttcatagagggttccttcataccagctgaccacgggttccggggccgcagccggagtggagcaggattccagaaacatggttgcacatattgttgtgaacaatatgtaaatataatgtgaataagaaataaagggcatgaggggacggcgcgttatccggatagttgtttcttattggatttccagcacgatgatttccggagggcagcagaagcgcaggggaagaacgctgcatcccaaaccgcgggtaatgaggaagggggttccgttcagctgggaccggggataggaaaatttgaccttctctcgtgagatgtttgccagggccctgcctccgggaaggcatatctggcctccgtgggtatgcgcgctgatgacgaggtccgccgtgccgggagccagcagaggaaaaatgtcgggtacatgtgaaagaaggatatgcggaatatccggggaaaaacgcagaggcaattcctccggcctgattctcaggtggtagtcgtccctgacggaagagagctgcagctcacggcctccgggaaggtgcagcagcagggaatcattccacatgggcaggatgcccagcccggaaaacatgttgcgccataagttccagccgtaatactggtcatggttgccctgcacggcaaaaatgccgagaggggctttcaacatcttgaaatattcccgggccgtttccggggccatgctactctccctcgtgtggccgttggcataatcccccagcaggaaaatcatatccggccgagcttccatgattgtttccatgtacctgtgcgccagatcgcccccgttcggacgcagatggaaatccccggcaatcgcgatacggaggggagggctttcttttctcttccactgaggcatctccatcgcagccgtgacggtttccacacgcctgggttccacctgccatgcccacatgaataaggagaagccgatcatcaatattgggacaaagatgattgccaatttgttgagaaaggggcggcgtggtcgtgacttcatgcagggcagggctcctgactgattatgaggccttttaaccaattttcaatcattcgtgtttgctaatcgggaatttgctggtatgatccgtcccgctcaaggtagggctgtccgatgactgcagctctatcttcatattaacatcctaataccatgcagtttacacacgaaatcgaacaaatgtgttgcgtcaagaaaggctgcaaccatggtccggctcctatcccgcaggaaggcaactggacgcaatccagggaaatcacggatatttccggcctgacccacggcgtgggctggtgcgctccccagcagggcacctgcaaactgacgctgaatgtcaaaaacggcatcattgaagaagcactcgtggaaaccagcggctgctccggcatgacccattccgccgccatggctgcggaaatcctgcccggcaagaccgtactggaagcaatgaacacggacctcgtgtgcgacgccatcaacaccgccatgcgcgaactgttcctgcagatcgtgtacggccgcacccagagcgccttctctgaaggaggccttcccatcggcgccggtcttgaagacctcggcaaggggcttcgctcccagatcggcaccctgtacggcacccgcgccaaaggcccccgctatttggaaatggctgaaggctacattaccaagcttgccctggatgaagacggtgaaatcatcggctacgagtttgtgcgcatggggccgatgatggaaatgatcaagaagggcgtggacgccaacgaagccgtcgccaaatgcacgggcaactacggtcgtttcgacgaggccgccaaatacatcgatcctcgtcacgaatgagattgaattaaaaagagtatcttaacttcaagcactattaccattatgcctcttttcgaatcctacgaccgccgcatcaagcagatcaatgaagccctggccaaatacggcatcggctccattgaagaagcggaacaactctgcctttccaagggaatcaacccccgtgaaattgtgaacggcattcagcccatcgcgtttgaaaacgccggctgggcctatgtggtgggagcagccatcgccatcaagaagggctgcacgaaggccgccgacgccgctgaagccatcggagaaggccttcagtccttctgcattcccggctccgttgcggatgaacgcaaggtgggcctgggccacggcaacctggccgccatgctcctgcgcgatgaaacggaatgcttctgcttcctggccggtcacgaatcctttgccgccgctgaaggcgccattggtattgcaaagtccgccaaccgcgtccgcaaacaggatctccgcgtttgcctgaacggcctcggcaaggatgccgcgtacatcatctcccgcatcaacgggttcacgtacgtgcaaaccaagtttgactatgccacgggcaagctgaacatcatccaggagaaagctttctccaagggtcccaaagccgccgtgcgcgtgtacggctgcgatgacgtgcgcgaaggcgtggctgtcatgtggaatgaaggcgtggatgtttccattaccgggaactccaccaaccccacccgcttccagcacccggtagccagcacctataagaaggaatgcaatgagaagggcaagaagtacttctccgtggcttccggcggcggcacgggccgtaccctgcacccggacaacatggcggccggtcccgcttcctacggcatgactgataccatgggccgcatgcactccgacgcccagttcgccggttcttcctccgtgcccgcccatgtggaaatgatgggcctcatcggcatgggcaacaacccgatggtcggcgcttccgtagcggtggccgtggctgttgaagaagccgccaagcagaacgcctgagcgagcagctgagcaaaaaatcgcagagccgctttcccgatttgggaaagcggctcttttagcaattgaaagaaaaaggggggatgtccccaatttccgcccccccttcctgcccttgtatccgcatcagcttccgatacggaatcttccatcccggtccgcccggggaggaagcccgcgcgaaggaacggatcttctggaaacggattcctgcctggcagaggccggcttgacggagcggatttccggacgggaggcagaagcgggaacaaccgtttttcccggttgcgtgctgtggggggaagggagaacaggaacggttccgacaaccgttttttgccgttcatgggccttataggcgcgttgcagggtaaaatcccgctgttctcccggtctcagggaataatccgcctttttgggaactccggctttttgcgccagaggttccacgcgccgctgcagctgagcggcggtatccagtttgccggccacccattccggattccactccggcttggatgttttaagggactgaagcaactgctccgctttcttgccgctttccagggctgccttataatccccctccttctcctgccgtgccgcgcgcgtcagggaaaggttggcttcgtaaaaagtgtctccgggattgccaagggccgttgtagccgccaggaacatgcagagcagggaacagggtagaaacttccttttcatgattgttggcacgataacatgattcctcgttttggaaaggcctttcttacggcatgttttgcgcagggccggactccgtttcccttgcggataaaggaaaggttctctattccgcaccccggagcaacttgacggaaagtccggagtgccgtatgctggacgggacctgctatatgacccggaacgagccatcatcccttccagctccgcagatggaggaagatcccagattcctgacggaacaaattgtaacctatttgggcaataagcgttccctgcttcattttctggggacggggctggaacaggtgaaaaaacgcctgggtaaggaaaggctgaaagcaggggatcttttttccggcagcggcattgtggcgcgttttctgaaacagcattcggaagacttgatcgtcaatgatctggaggaatacagccgggtcgtcaatacctgttacctgagcaacgcggaggaagtggaaaatctggagctggacagacattacagacgcctgctgcggtatatggaaacgcatgaatcccctggcttcatcacggaactgtacgctcccagaaatccggactgcatcacggcggatgaccgcgttttctatacgcgccgcaacgccgtgtacctggatacggcgaggcagaccatcaatttgcttccggcagaagtcaggccctattttatcgctcctcttctggcggaagcttccgtccacacaaacacatccggcgtattcaaaggtttttacaaagacaggaacggaatcggcaaattcgggggaacgggaggcaacgccctttcccgcattctgggagaaatttcgctgccgtttcccgtgttttcccggtttgactgccggtattccatccattgccgtgacgccaatgaactggctgccgagctgccggaaatggatgtggtgtacctggaccctccctataaccagcatccgtacggttccaattatttcatgctgaatttgctgtcttcttatgaaaagccggaggaaaccagccgagtttccggcattcccgcagattggaaacgttccacgtacaatagccgccagcatgctccggaggccctgttccggctgctggaggattgcccggccaaatttattctgctttcctacagctcggaggggttcatcaactatgaggaaatgaccggtttccttggacgcctgggccataccgttacgctggaaacgtcgtacgccgcgttccggggcagccggaatttcagaaaccgtcctcagaacgtgacggaattcctgttcctggtggaacggttttaacagatgacaggaaaggcagcctccatgcaaactcatttggaacgcttcatccgttttctggccgcagagaaaggcctgagcaccgcctaccagctttccgtgagacagaccctggaggaatttgcccggtttctggaaatggataataccggccttgcccaaacgggcatcgacacgctttcggcatttctgcggcatttgcaggaccggggcatggcccgcagctccatgcgggtggaaatggtgcatctgcgtatttttttccggtggctggccggaacgggaatactggaaaaagacccttccgtatttctggaaatgccccggcaggggttgtcgcttcctcatgtgctggatcagaaaaccgtctcaaatttgcttgaaagcattgacattcaagatattcctctgggatgtagagacagggcgctcctggagatgatttacgcctgcgggatgcgtgttagtgaaataattaattgcaaattagagagttttgataaagatgaagcttttgtccgcgtgctggggaaggggaataaaacccggctggtgcccgtagggagatccgctttggatgctttgcaaatgtatttggaaaaaggaagacccaaactggttaggacgggaacgaaaagccatatctttctgacagtacgcggccgtccgttgacgagggagcggattcgtcaaattctccgggaacgcgccagagccgcaggactggaacagcatgttttcccgcatatcctgcgtcattccttcgccacgcatcttctggaaaacggagcggatctgcgtattattcaggaaatgctgggtcatgccgatatttcaaccacccagatctatacgcatttggagcagcagcggctgaactcgattcatcaccgcttccatcccagaggatagttcatcattcattcccatgccgcattttttcacgtcctcccaatcatatcataatcatttaaatattaacggtcggagaattattctaccggaattatatttggcattacatatattatgcgaagtatagtttaggcagcattctcccattctcattggacggaaaacgcgctctgtcacttgacaaatatgcaggcatttcatagcttcattaaatgagtggcccttgccttgtccgtaccgttgccattttcatccttttttcatctttttcccttcttcatgccgaagatgaggaattttccgatatcatggaactggtatcggaaacggagaactgttccgccaaactggcccgtgacaaaaacgcgacggaagaacagaagaaggaagacagaaagcgcaggaaaatcggcattggagaaacggttactattaccttgaactgtaaaaagccagctttgttggaaccaaaggatcaaatccaatggaaagtgctaaaaggcaaaaagttgcttgaagaaggactagaaaaaaaattcccgataattaccaatcgataacatttcagatcaatccttgcgtaagtaaagaacaaatcctacagtccggagggaaagtagctattacagtagaaacagaacagggaacggcccttccccgccctatcgaatttgacgtggttttccctgaacagcttaccgcagaacatgaaactttgggcgggatggtcaaaggtctccctgccacagatatgaatttttcctggtgatgggtatcctgaccacggtgtttctgctcagcttgtcgtttctgttcatcccctggatgtctgttttaaagggattcgtgtcattgaaaaagacaaggggtatgttggagctgccgggagtctggcgcagccccatgcagcggacagcgtttggagcttaggtcttgacaaccgttttggattgcatgacaacataggtataaaatccggggtgaatggccatatgcaatgggatgaaattcagggttatgatgccgatggtcatcctgtctataaacattcgtatcctaatgaatttacatggaattgccttttcaggacatatgggggagatgaaaacaaagaaggaatatccgatattgccacggtttttcagaatttttatatagagagtaaaggagaaggattgttttacgccagatctggtggataccaagaagaaggatgaatgttccgttgaacggacgtctggtggcgatcatatttttaaaccctgatatataatttgacgatgaagtctataataaaatgttttctgtcttgctcatcctccgtagcgctgcttgcgaccttttcctctgttattgcattgccttcgtccgccgattttccggcagattcgcaagaattgagactcagcagggattccgacattggagaactaaaaaaccttctcaatcagggggatttggtgaaattttatcagacagcccacacccatatggggcagcttgagtggagcgacatcagagggggagtttccccggacaagctggatcggttattgttgatagcccggattacttccgctgctcctctgtttggagagaacgaaaatacaccgtttgaacaaatgacgcaggattttgacttaaaaaatgatatttctctcaaagggaaagttatggtagatctggttatcatttccaaaatcaatctcaagcaaaaattctctgccgtgagaaagaaagaagtggggcagctttgctccacttacgcggcaacgatgctgaagatgatgaaagaagcctacattcctgatttcgagggctggaagaaagaagttatggagagaaaaacggcggtttggagcaaagagtttaacgccaggtgggagtccttcctgaaagaaagagacgagagagtggagagaaaaaagaaggaactctccataccattcgaacagagaatgcgacggcaaaaaacggaagaggaacggataagagacagggaatttggagagaaagacgccgccttcatgcaggaagccagggaaaaatgggacaaatgtaggaatcttgccaatatattaagtatcatggaagatcgaaactccaaaatcaaatcattcctcaaagatggaggaggaggtttattacgaattttgttggacaactaccccggcaaagccaccgaagtgtttaaatacctgaagctggcgggatatgaggaaggagaaatgatggagttggttgatcgggaggagggaaaaaccgaagaaacggaatttttgtatcaaagcccgttgggaagaaagttccttaaagagaagaaacaaaagaaataattactgccagagcgcggaatcatgatatttttagtttgcaaggatattttatctttttgagattccttctctcttgccagatcacctttcatccttcataataaaaaaagcatgaatactttcgtttctctttgcctggtcgggagcctcagcctgggttccctttgttatgcgcagtacatggataacgatgccaagaagaaggtaatcaaggatttggataatttgctcgctctgaacaggtctgcagaaaccaaggtaatcaatgccgctatcagcaaactgaattccgctaagagggatcccggcgccgcatatgacctgctgattcagtccaagaagtttctgatggaaacggaaaaggagaaggacaagagccaggggaagagcgccaaaatcgcctccaattccatgaaggactggatggaccgtgaagcgaagaagtaccaggataaaaatgcccgtaaaggattaatgcttcaatatcaatggggagttctcgtcctcaaggctcgtcttaaggaaaatttaatgaacgccacctcccattccaccggaggaacagcggaggaaaccctggacgttacggagttccagaagccggccatggatttgctgaatgcctacctgtccgcctgctccgaccctgattttgtcgaaccttcctcttccaaaaacaacaatggagcagccggaagagcaagcgcccgtattgcggaacaatccgtccttaatacggaagtgggggaggccctgggcatcagtagcatgtcttccaaggctttcccggattccatgaaaaaccgggatgaaatttttgacaagctgtttttcaccggataccggaagacccgcaaccttcccgccctcaggcaggcgtggaacaagagaatttccatggaagtggctctgggaaaaatcagccatgccatttcctccggcaagaaatccggcatgcagggccgcatcgccaatgcgtccgaagacgaatttgatgagcaggga

SEQ ID NO: 1 - DNA, 2700888 bp, Akkermansia muciniphila (residues 1,350,445-2,700,888 of 2,700,888)
  source 1..2700888: mol_type = genomic DNA
gccgccgttctggatcgtttgcgctggcgctgcgaactggattgcttcgacttgggagaccaggcaaacgccacgaggaatatgatgacgctgatccggacgacggtggatcccgtgcgccgggaacaaggtatccgcaccctccgggataaactggttcagagcatgaagagcatgatggattctccggaagaagaaagcatggctgacggttcctcttcatcctctgcaccgcgtcctgccatgcgttcctccaaaaagaaggctccctccaccacgattacgaccagccgtgaaatggatgatcccggagccatcggaacggatgtgccgaagcctcccaagccgtccccagcccggagtgacgatttttttgaagacatctgactttcttcagacaaaagatgttgcccgaacggcggtttccctgttcatggaatgcacagagcatccttgacgtccggagccgccgttttatacattaagggcatgtatcagccatttcaatttttcatgcccgcgcaaatcttttttggcgcgggttctttggacaatcttggttccgctcccctgcctggcaccaaggccctgatcgtcatcggcgggtcgtccgtcaaacgcctcgggtatctggaccgcgtacaggctcttctgaaaaaacagggagtggaaagcgttgttttcgataaagtgcagcccaaccccgtggtggagcacgtaatggaagcctcctccctggccagggaaacgggctgtgatttcgtcatcggcctgggcgggggcagcagcatggattccgccaagagcatcgccgtgatggcggccaatccaggaacctactgggattacatccagggaggttccggcaaggggcttcccattccctgcaaacctcttcccatcgtctgcatcaccactacggcgggaaccggaacggaggcggatccgtggaccgtcatcacgaaagaggacacgcaggagaagatcggtttcggtttcaggggtactttccccaccatgtctatcgtagatccggagttgatgctttccgtacctcccaaattaacggcataccaggggtttgacgctttgttccatgccgtggaaggatatatggctacaatcgcctcccccatgggggacatgttcgcgctccaggccattgaatacattgccaaatatcttccgcgcgccgtgaataacggggatgacctggaagcgcgcgcctatgtggcactggccaatacctattccgggtttgtggaaaccatttcctgctgtacgtcggaacattccattgaacatgccctcagcgccttccatccttccctgccccatggcgcggggctaattatgatttcctgggcctaccatgaagcctatgctccttcctgcccggaacgttacgcaagagttgccgcagccatgggacaggaagcctccgtggacggtttcctgaacggcttgaacagcctgaaggaagcctgcggcgtagacaagctgaagatgtccgaattcggcattacaccggatttatttgacgaatacgccaaaacggccttttccaccatgggcaatctgtttgagctggaccgttgcaagttgactccggcggacgtggtcagcatcctggagaaatcctattcctaggaacaaacttccggggctatcgcccgcagggaatatccctgcgggcgcgagagatctagctcagccgcggcattaccaagacgaacgtgacgcgtatgattccgatttcctctacacttgtggaacagatgaactatttcaaagcagaggtttttcctgcagggatctgatgagccaatggttcctctttgataatagccttgcgtgtggaatctccgggtattaagccttcagcccccctttatcagatggtggaaatccatcgtcatttgtctctcactcgttgccgcatagtcgttgataatttgttgatagctcacttgtccaaaaaagcagcaatagaatcctgctcagacttacagggaaacgggaattccatattggcttaacatgttgcctgagatttcaaaaaaggtagaaccagatgcaagcctttcggatttctccttaatcatttctcccataaaataaatgaaataagaatttgccctactcgtaagtaaagagtagggctgtatgagctgtcagaattctaacagagcaattttgaagtcctagttgcgtgattcgtctgatactgcgttcaacataccgcaacccgccgtctctgcaggtgcgtaccaatcaatatctccctcccaaaatgaggcttattcaagggtttccccttggctcttttgcaggaaatctgcatttccgcctcatgtcagcgtaagcatcatgacttacgggaggtcaaaaccgccgtttgtgatgaaatctcggagtattttgtccagtttcatggccaatttgggtgggggtaatggagtgtgagacccggtctcgaagtaggctttggcctttttcttatccgctgtagctttcaatgcatcaaagcggccaaaatcgttgatgttcccctcagtcacccgatgagacatcatgccgcgcaacaatgtttcatccagaccaaacacggcggcaaaacggtgtatgcggtcgtcctgggcttttgccatgtactcggtcacatagtcacggaaagtcttgccctctacaggtacaacatcaccacgcttaatgtcgtgcaggaaaatatcggcatacttctgctcttcttgggaaaggaacgcaaaggacttatgcagttcctgctccgtctgctgcaattcctcctcggtagcattgcccagtagcttcctaaacttttcaaatcgggagttcatgtaatcattgtcgattgcgccggtggatatcgggatagggaagcccggaatgtcgtaaggtacatctggcacatggccatcgctctcacctccaccgccgccgaacagctcgttgtagcgcacgctgagaacattgaaggtgtgttcatccagagcaacctccatcgtggagtctgcaaactgatagatgcgcttatcccaacggaagccttgaatctttgcggcttccatgcgggcattcaaatcccggaacagccgtgcgaacttcttgcattcttccggctccgcaggcaagtgggagaaatcctcaattccggcctgatgaaacagatcagaaatatcctgatagatagtattgagcaattccaaattcctattcagtttctccacgaacaatcccaaaggtttatcgccggagtacagcttcaccgcctgctgaacgttgcgctccatggtatgcggcttccggtaatagcggatggtgccgaaaggcttatccagaccaaacaggcgattggtgcgggaaaatgcttggatgaggttttcatagtaaagcatcttatccaggtagagcgtgttaatccatttggagtcaaagcccgtgagcatttgatccaccacaatgagcaaattcaactgctgctccggcgatttgtcgatgcgctcgtatggccgtttatgcgccaaccttgcagcaatgtcttttttcatgcttaagcaaaggtaggaatcgaaaaatcctgcccgtagcgagcgttgtaatccttgatgatttctacaagcccttgctctttcatcaggccatggccgttgttgtcgatgttcgcgtcaaagatggcggagattttcaggttcggggcttctgctttcaggcgccggtagtactggactgcttcctgaatgctggctgtggcaaaaatagcatggaacttgccattatggctcaagactacccaatttttcagaatgtccgcgatgacagcctgttgatgctcctctctttcatattggctgttaggcagataatactcgatgccgtgcttcgttcccgtttcatcttcatactccgccagcatgggcagccccatgtagtgctgaaacacggcggctttcgccggggctgcgtaggcttcctctactgtgtgcgctttcgctttttccaaggcaacagccgttttcagctcgctgtcctcataggttaagaccttgtaggggtcaaagcccaggacattcttatcccgaattccatcggcaatactgtagcggtgcagctcatctccgaaaaccgtcgtcgtcgtattgtctttcttttggttttcctcatgtatgggagttccgctaaaaccaaagaatatggctcgcgggaaggtggctttgatgttgatgagcatatcaccgaacgtggaacgatggcattcatccacaatgaacacgatgcgctttccgctcatcagttcgatgtcagccgctttcagtccgccctccgcctcattcttaatgttgttcatcttctgaatggaggtaacaatgagcgtatcggaagggttgccgcttttcagttttgtaacaagttcgcccgtgttttccgttgcctgaacatccagactgtcaccggcaaagccccggtattctttcaggctttgcgttcccagttctattctgtccatcaggaagataaccttgtccgcgtctttggacgtggctatcaactgggcagacttgaaagaggtcattgttttgcctgaacccgtggtgtgccacacaaaaccgccaagctggttcctctcgtcccattttgtttgagccaccttatccgaaattttgctggcggcaaaaaactgatagctgcgcatgactttcaacactccgtccgaattgtcggcaacagtatagaagcctatcatctggtgcgccatggggattgacaacagggtggaaataacgcttttccagtcattaacaggctcgttatccacatcagcccaatggaaatagtaatccggattaaagcgcccgtctattccggggttggcgaaatacagcgtttcttccggtgtcatgccaacaaatatctgcacaagcgagaacaacccgctaaagacgccctctgccgtgtatttctctatctgtcggcaggcctgactcaccggaacgccgctctttttcagctcaatatgaatcacgggcatgccgttaatcaacagcatcaaatccccgcgcctattattgagcaagggggatgctgtgggaaacttgggctgctgcacaatctggtatcggctttgcccagcggctatttccctgcggtcataaatcttgagggaaacctccttgccgtagtgtaaggtatcagcctcgttatcgcgcgtaatcgtcacgttttggccgttgataaaaccgttcagcttcaacggcgatttgagcatggcgatctgctccagaatttgcagcatttcaccctccgttaaaggacaattattcaggctgtctatgtcccggttgttctcgaacaggatgtcagcccagttttggataagctgcttttccgtgtagtttttcaacactgcgctttcccatccgtgttcggacaacatcttaatgacggcttcctcaaaggcgctttccgttgtaaaagtcataaaatctcctttcaattaaacaaacattttttccagacaggctttcttgatgttttgcagtttttccaacttacgctgatgaagggtgatgaggcggtcgagcttttgaaagaaaatccctatcttcttttgctcaatctcattgggagcacaaatttcgagatttgcgacttgttcaagagacaggttaggctgagccccgattgttggattttttctaacgaaatcagaaacagctttgcctttcaaaaaggtcttaacgtaatcgagatggccagtttttagtcttataatggctaaagcctgatttgtattagctggcaatacgtttgcatccacagaagtcacacgacctaatgttcctgcaatcgaaaacaaaatatcattctcccttaattgagacctacgcaaatatgtctcatgctcatgtttggagattctctgagttataataatttcgcctgattcattgtcaatattttcaattttgacatagtttacatctcctgtgttggatttatccagaggagttgttcctttcgtgattagagaagtaatctcccccagcttacgccgttcccatgcgtcagtaaatccggcaaagcggacttcggggaaaagctcaccatttttcgggaacattttgtccaacatcgattttttgatgttgaggagcttttcatacttacgctgatgaagggtaatgaggcggtcgagcttcaggaaaaattgccctatatttccttgttcttcggtcgttctgggaaaactgacatatgttgagcgtaacgcctgcttagatatagatgtgacttttatgccctgcattaaggggaaaagttggtcgtggtatgctggtgaattcatgtaatagccaagatagccctcgctgagtttttccagaggtctacatggaattgtatggagtcctgctagtattgcttcacctttttctccagttatttctgtgcacttgccaacattttcatcttctgctgtgtctgccataacgacatctccattttgcagaaatgatgctctataccttacaacgcttcctgcatttttgatgatggatagaccagctgtggccacattggtacactcgccaaattttataaggacatccccgtaatgaatatttttcactccggttcctgaatccgacaatttggctcgggacagcgtattgttttgcaaaatctcgaaaaacacttcgtgcttatgccgttcccatgcgtcagtaaatccggcaaagcggatggacggaatcaacgatttctcattcatgggcgctgcctccgagtagggatttgagttcctgaatgccctgcatatcgaactcgttgccggtcaattcatccaaaagagaaacaagagaggactctgtttcggcgatttggctgtccacctccgtgaatgtcgtttcatatttcccagccaaagcaaggagccgggcaatgaaatcggcaatgacagcggacggcaacccggccatgctatccagcaagggaggaatccacttgagcttaatcatttcccttgcctgctcatccgtcaattcctcaatggtctttttggtgaggaggtggagcgcggtactgtccgccttgatttgtttcttgagggatttttcctcattattcagggcgttcacctttcgcaggacagcgagcgtttccggctcaacctccatgcccttgacagcctttgcaacctctttcgacacaaaggcgtcgccctcatcattgacaaagggcttgtccttatcctcctcgctcagctcattcagcaaagactcatactctgccgcgagttcactcaagcgggcttccctggcgttcagcctggcaaggtctgcggcgagcagggttttctgtaccagggcaaagggaataatgtgtcccatccagccgtcctgcacctcctgctttttgccgtccttggttttaacgaccatgttggggtcaacctgtttggaagaagcaaagccctcagtcctgataatttccaggtccacggcaatcttcttccactcatcatccagcaactggtaagctttgtatttgtctatcaggggaagcccgttcaggcgagagaaaacatcatcactgatgatggattcttctctggtgagattgagcgtttccataccatcgagcaatcgggtggtgaggaatgcttcaaaatcagcaaaagaggaagcgtagcgagcggtaaatgccgtaacatcagcgtgcgtcagaacggacgacttgaggtcagccacgttcaagcggcaatgagcctcgccggaagcggtgaacagagcatctttcagatgagggaatgctgcccagtactcatgaaaatccgccagttcagacaaggggatgccgccaaacatggtagcgaaaatatcccaacgttcgtttttgtccgaggaatcgacatagcgcggtatattgaggttatagtcattgccccggatttcatcaaggcttaccaccttggcgaacttctccacatcggccgcgggcagaaaccacatccacaatcttcttgatgtcgcacgcgcggaggacattgttcttgcccaccttggcaaagcccttggacgcatccacaatcagcacatccgtattttcccgtttctgcttgagaaccataatgatggtgggaatgccggtgccaaagaaaatgttggcaggcaagccgatgatagcgtcaatatggctgccttccaccaaattcctgcggatagccccctccgtaccgccgcggaacaggacgccatggggcagcacaatcgtcatgatgccgtcaggcttgaggtggtataggtcatgcaacaggaatgcatagtcagccttgcctttcggggcaagcccaaagcggtaacgcgggtcgctttccttgtctgcgggattccacggctgggaatagggaggattggagacaacagcatctacatagagcgggtcataggtgttaaccgggtcgttatcatcgaaatacggccaatcttcctccagcgtgtcgccgttgcgcgtcacgatattgttcggcaaaatgccccgcattaccagattcatgcgggtcaggttgtaggtgttttccttaagctcctgagcgtagtatttgatgttgtctcccccgcccatgtaacgcgccacgcacttgccgatattgataagcagggagcctgaaccgctggtggggtcataaatcttgattttctgcctgtctttgaggtgggcagccacgatttccgacatgaggagcgaaacctcatgcggggtgtagaattcgcccgctttcttgcccgcgtttgcggcaaagttgctgatgaggtattcgtagataaaccccaggacatcataatcctgccgcccgtccatggggatatccttgatgagatgcaagaggtcgcggatggctttggtgcgggcaccggagttttccccaagtttggagaggcctgtttccaaggtggcgaacaccttgtcaaagacctttttgtgagagggattgatcaggcggctgaaagcagaaagagcctccgtcacatcagcggcgctgaagtcgctgcccttgtcaatccatgtagaaaagaggtgtttataggagatgaagtaacctacattgctgcggatatagtcaaccgtctccgcgtcatcttccgtaacatggggcaaatcatcgtctgtccagtcgttctctttcaggaacttgacttccttgtcggaaaggaacttgtagaagatgaagccgagaatgtagtccttgtattcattggcttcaattttggagcgcattttgttggcagactcccaaatcttcgatgcaagctgttgtttgttcatagacagggttgaacagtatacacatatcttcccaaaagtccagcgacaggcccatcagcaattccattttttccgcttgcagcgtggtctttcctcattcgttctgcgtcaaggaagcatcgagcctcgttaccaccgaattgacagcgtttaaaccacccctgaaaaacagcgcggctgccgggtttccatgttttttctttaccgggcggccagatagcccaggccaatggcaaggagccccccggcaaagctgatgagagtgtaaaggaagaaggcggagaagttcccttccttcaacaacaggaaggattcattcatcagcgtggaaaaggtggtgaaaccgccgcacaggcctgcggtaagaaagagccgcgtttccgtatgcaccaggctccggtcgaacaaaccgtagaggcagcccaggataaaacatcccagcaggttgactgccgccgtgccccaggggaacgaacttgccgaagtgacctggacgaaccgggccagcaggaaacgcaatacaccgcccgcaaagcttcccaggcccactatcatcagcattttcatcatatagcggctttttctatgttttaatggggaataaagtttcggagcagctgccgaaatccgccgggaaagacgggctgcggcttcttgtccatgaaagggttgctggctgcgttcccgaaaactggtttggaaacgttcgtgtcgcctggtgacgccctttaaccggaaacaagacttctggcctgtatgcaagcagaacctatttcttttaagagtgtacgggtaaaataccctgttttttccatatcgccagcctttttgttcttgattgcagggtaaaaccgtatttccttttttccatgtcccagccccttctcgttaccggaaccatcggaattgataccatccttactcccggcggcagggcggacggtgttctgggcggttccgtttcctttgcggccgtggctgcccttttgtttgccgaccgcgtggatgccgtcagcatcatcggggaggatttccccgcccattatgaagcggcccttgaggccaaagggttgtgcatgaaaggagtagaacgcaagaaggggccttcttttgcctggaccggggaatattttgacaatatgaacaagcggaggaccgtttgtgccaatgatgccgtgatgctggaatggaatgtgcacgttccggagcctttgaggaaccatccggtgctggtttgctgctgcatggttccggcccagcagcttaagtgcatggaacaatgtccggacgcggcgttggtactttccgattccatggacaagtggctgcgccgccagccggaattgctggatgccgtgatcagccgttcccatatcaccatgatgaatgaggatgaggcgaaggaatatgcccaggcgttcaccgtcatggaagccggggaattcctgctttccaaaggcgccgcatacgcagtggtgaaacagggggaatacggggccactcttctgggacgggatgccggcgggaatctccggattttccgttgtcccgcctatcccctgaaaacgctggtggacccaaccggcgcgggggatacgttcctgggggctttggtaagctatttgtccaccctgcctcccggccttccttcgtttgaggaagtgaagagggggattgtgtacgggacggtggcggcctccttcacctgcgagtccttttcggcagacgcccttctttccatgacaaaagagacctttcgccgccgtcttgaagagtatgcggagatgtgccgcctgccagacatccggctctcttccgcaagtgcctgttaagacggaatcagacctcctgaaaaagaggggatgccgcctttgatggttcgttttccggtttccgtttatgcggactgtccgggatttccaggtgaaaaaggcccggacgcggaacgtggaaaaccccggcgtggcttgcacggccggggtttccgtaaaaacaggggatgcagtcggcgggatcaagcatcctgaaggccgaatttaagctcggcttccgaaaccacctggccgttcaccaggcagcgtgccgtcgcctggccgatgtttccgcgcatcttggtcagttccgcttcaatgatgagcgtatcgccgggaaccacgacgcggcggaatttaaccttgtccgcactcatgaagtagccgagcttgctggcattgccgggctggcgcagcatgacgatggaggctacctgggccatggcttccacctggagaacgcccggcatgaccggatggcccgggaagtggccctggaaaaagagttcattcatggtcaggttcttcaatccccggcacttcgtttctccttcaaaaccgataatgcggtccaccatcaggaagggatagcggtgcggcagaaggctcatcacttcgttgatgtccagcacggcgtctccgtacggaacattgacgggattgggggccatctgctggttgcggtggtgttccttcttgagcttggccgtaagttcggtgttcgggccgtggcccggcttgatggcgatgacgtggcccaggataggtttgccgcacagggtcaggtctccaataaggtccatggccttgtggcgggcaaattcattgatgaaacgcatgggttccttgctcatgagctcctcgccgcggatgaccacggcgttttccaggctgccgcccttgatgaggcccttttccagcaggggcttgatgtcttcgtagaacgtaaaggtgcgggccggggccagttccttttcatacgtttccggcgtgataaccgagtcaaagtactgggtaatgcggttttccggccccacgcaggtgacggaaacgcggaattgcttggaggggagaatagtcaggatggaaccgcccttggtttcaatggtaacggcctcgcgcacttccagatagcggcgcggcacatccagttccacgatgccggcgctcttgatcagctctacgtagggggctgaggacccgtccccgataggcggttcattggcgtccatttcaatgacggcgttgtcaatgcccatgcccgtgagggcggagagaatatgttccacggtatgcactttgacggaaccttcagccaggctggtggcgcgttccacagtctgcactttttccacgtccgcgctgatgaaaggctggtccggaatgtccacccggcgggatttaatgccgaagtcggcaggagtaagcttcagggtcagggtaacgggctgtcccgtatgcaaagaggtaccggccagggaggccggagagccgacagttctttggtttccacatgccatgcggggatgctagtgaatgagcttccgtttggaaagcacgaaatcacggattttcctttaaattcggggaagaggcggcattccggcgtgtcatcccggaaagaagaggataaagggcgcttgaaaaaaagccgctcacccagtagtgatgttccatgcacatcacagcaggcctccgcatttcccgtgcgtttattctcggcgccgggctgggtacccgcctgcgccctctcaccggcattctgcccaagccgctgattccctttttccatgagccccttattctgcattccatgcgccgatgctacgattgcggcatacgggagttcatcatcaacacccaccatctggcggcagcctgggacaaggtgttccctgaacattcatggaacggctgccccgttcatttcagccatgaacccgtgctgctggattccggcggcggcgtcaaaaagatagagcccctggcttccgcggaagaaccgctgctggtggtgaacggagacatggcggccacatttgacctgggccgcctgctggaggagcatttgagccgccgccctcccgtaacgctggctctccgcacctccggagataagaagaacgtgggatttgatttttcttccggcctggtgacggatatgaggcacgccctgggccgcgaccccggatcctgccaattcaccggcgcgtactgtatggagccggaaatattccgacgcatcccttccggggaagccgtttccattattcccctgtttctggattatatccgggaaggatgcctgcgcggcattctggcggacgacgggttgtggatggacatgggaacaccggaggcctatcttcaagcccatctggatttcccatcccccgttccacgcatccacccccaggccagagtatccccccgcgcctttgtggacagccattgcgtgataggccccggagctgcggtagaggacggctgccgcctgcaaggctgcgttgtctggccgggcgtatgcgtgccttccggcacctgcgcggaacgccggattttctattgttcccccaccgattactgacgatgctttttctgcgcctgcttcccctgatattgtgcttttccggcctggttcacgcagaacaccgcgttttcaccaggaaggacggatttttgtccatgcgggacaagctgaacgtgtattttttccgttctgatacgcaccgcctgctggtaagggatgaagggagcgtcaaaacgccccggtacggctccctggacaaggccatgaggaaaagcccctgcgtggctggcgtcaacggaggattcttcagcgcagacgcggagggaactcccctgggcctggtcgtccaggacggcaaacggctttctccgctggccacggggtccttcgctgtttccggtgtcgtttacgaaggaggcagagacggattaaccctggtccgcagttccgtgctgaggcgcatgagaagactgctggccatgcaggcggctatccagggggggccctttctggtggagaacggctccgccgtaaaagggcttaacgcgcagaagtccacctaccgcaccttcattgccacggacggcggcaggaggtggtgcatcggcgtttcctcctccctgactctgaaggagctggcagcctggctggcggctcccggggcattgggaaatttccgggtggaaacggccctgaacctggacggcggctcttcttccgccttctggtgccatgaaacaggcatttcctaccctgcgttcaaacaagtcaggaattatctgggcgtagcccccgtggaacgccggtaaacgccgttctccacgggaccatggacgcgtttccctgcgcctatcctgcgcagcaacagagccgcgaacatcaggaaacaaaccaggacggcccagtcgcccagcatggcgtacagggttattttcgtacagcccacaggcaatgtggcagccatcacccctctggtaaacggtgaaccggaggaatcccgcaaatccgcaataaccgcgccgttgggggccagagccacgcttacgccggtattggcggcacggaccatggcacggcgcagctcaatacaccggaacgccgcattgcgccaatgctgttcgttggcgcaggaacggttgaaccacccgtcattggtcacgttcaccatcaactggggctcctgccggatgaagcggcgcacccagcttcccacaacatcctcaaagcagacaagagggatgacccccaccgtaacggagcttccaggacggatgggcacgggaacggggctggaggaacacccgggcgtataattcagtcccatggcggttccggcggaagcctcaaaggctttttccagaaatgggaatgtttcccgcatagggatgtattcgccgaaggggaccagcatggccttggcgtgcggccgggctgtggaataatccccctcaaagacggtaaggcagttgtaagcccgcgccacacgcccttcatcagacagatagatatcatccgtgcccgtcagcagaataaaattgcatatcccgttccggagagcctggacgtaatcttcttccgcgctcagaaagttgacattgtcctggttggagaagcgttctcccgtggcatcacggtaaaacgtggaaatggggaaggaactttccggccagattacccaggccggcatatccagggaggcttccgcgccgtctttgaccgcctgttccagagcgcggttttgaagatccagcattccctgttccgtcatgtccagcaaagcccggtaaatgctcctccggttggcagggtcccatttttccttctggctcagattcagctgcacggccatgacgggaacggtgaatctgccgtctcccgtggcttctgcagactgggcggagtaacgggccgtccagaccacgccagtgacaaacatggttaaaagaaccgccaccagtatgaaaaaatcccagggaacagtacgcctgccttcatggataatcatggttccggcccggcggcaaacgcgccagagccagacggaaaaaacggccggaataaaagccagcgccgttactccaaggtattccgcccactgggccagaggattgccgtaaagggccacgcccagattgttccagccgaagcccggtatcagccagccccgcccccattccagacatacccataaagcggcgcccgccagagcggcggaggcgctgggcagtatgtcgcccagggcccaggttttccaggcggcccggcgttcctttgccgtcagcctcgcatcgggcagcggccgggcgtccggtcggaagaacactcccatgaccagagcccagaggccgggaaacaggcctccgtaaaaaatcatcaggggaatatagcccagcgtgctgacttcattgacccaccagaaggaaatgccgtaaaatactaccccaaacatccagccatacagggcgtatgccagcattccccttttcccctcccgcctgcggccgtaccacagggctgtcagcagaggcaggaaccctatccatacgcacccgccccagtccaccgggataaaggcgcaggccatcagaattccggaaaaagcggccagcagcagccctgcccacacgggcaggagacgagggagggaagcaggtgggatattcatcgtgaaaagccttttattccgggaacgggaatgccgccattgtcccccatgctgactcattcctgcaacaaaaaagattgcaaaatttactcaaatgcggaaatagtgggcgcagttcatacaacccatcatacacaatggcagatatcgacgaaaaaacacctctaaacgtccccggcaaattttacgtggacagttcctgcattgactgcgacctttgccgcgaaacggctccggaaaactttggacgggatgacgatgaaggagtatcctatgtcaagaagcagccggacaacgacgaagagctgagcgcctgtgaggaagccctggaaggctgccccgtggaagcgattggcgacgacggcgaataatatttctccatatattattttaaccggcccggggctgttggcattcaacgctccgggcttttattttcccccatgtcctccccctggtttccctacacgccggacagagaccgtccggatccccacgcctcccccgtccggtatgattatctttcccgtgacgagcaggaggtgaggcaggcgctggcggactggttccagatatcccccgccaccagtgaaacacgtaacctccatacggcggaatccctgctgggggatattctgtccaggcttcccctggacggcgacgggatggatcccgaattgctcagggaaggatggctgaaagctgcggggccattcctgggccagcaatccaaccttctttccattgtcaagggagtggccaccatccaggtgcttcaaccggccatgcgctaccatctccagcagtggcagggagccctgctgggaaaactgaaggaccagttcggcaaggacgccgttcattccatccgcatacggataggataatcttacactctgaggaatgcccccttttgccggtttccgcgaaagattatctattatccacgtgtaatatttgccatgcgattatccctttccgcgcctttgctggcctccggcctgatgctttgtcttacctcctcccatggagactgggcatccccgcaccctctccagcaggaaaaagccgctccggtcccactgattcccttcccgtcccaggtggactggaaaacgggaacatgccctaaaaaggctcccgtttccgtaaaaaaaaacgcgtccctgtccaagacgctgggcaaggaagggtatgaactgcggatccgccccaacggcattctgattacggccgctgacgatgcgggtgttttttatgcctgcagaacgctggaccagctgggagccaggggagattacccatgctgcgacatcaaggacagccccgcgttcgccatccggtgcttcatgcatgacgcaggccgccatttccggcctgttgaaacactcaaggcggatattgatgaaatggcccggctgaaaataaacgcttttcactggcatctgacggattaccccgcatggcgcatccagtgcaaaaagtaccctgttttgaatgatccttccaagaggattcagggacgggacgttaacggcacctactcctatgaccagatacgggacttattccgctacgccagggagcgccatgtccagattattccggaaatcgatatgcccgggcacagcacctattttaaaaactgctttggcttcccgatgcatgatcccagaggcatcaacattctggaagaactgctggaagaattttgcagggaaattccggcggaaatgtctccctaccttcatataggagcggatgaaatccgcattcccaacggaaaacagtttgcggaccggatggcggccaaggtcaaatccctgggacggcagcccatccaatgggcgggcaacaatgacctgcctgtgtccggagacagttatgcccagctgtggaatgatgaaaattccgtaggcctgccggatccagccaggcagaagaatccctacttcgactccacagcaggatacgtcaattcctttgaccccggcattctggtgcgcaggaatttcttccgccagccctgcggaacagccaggggaaacaaccattccctgggcgtcatccagtgtctatggccggatacccgggtggagaacaaaaaaaacattcctgcccagagcccccagtggcctgccatgttcgccatggcggaacgcagttggaaaggaattccagaggatggttcccgttttgccggcagtctgccggaaaagaacacggaggcttatcaggccttctctctgtttgaaaaacgcatggaagccctggccggaagcaggcctttcccttactggagggattctttcgtggaatggacggtgttcggccccgttccgcaggacaggcaggaagaagtaagaaataacctgctggcgggcaaatctcccgcaggactgtctcccgtccagacgcgcggaggcaatttgtatttccgaacccgtgcgggtgcggaaggcctgtttcccaagacaaaaccagggaatacggcctgggcggagacgacgtttcactcacccgtggagggcaccatgcacgctatggtggggtttgacgctccggcccgttccacacggcgctgttccggagtaccggctgccggggagtggtcccagtgcggcaccagaatatgggtaaacggcaaggaaatgaaaaatccccagacttacaaactggcaggccagcggcgttacgaaaagcatacatggaattcgcccgctaatgagataccctttgacaacgaggaattctggtgggcccggcctcctgttccctttcaagtgaaggccggggaaaacaggatcctgatagaacaaccgtacacaggagaattccagtcgtggggagtcagcttcattccggtgaaaaaagcgggagaccgctggattgccgacccaagctattatgccaaacccaggagagggaaacaggatgacgtctctccggtgccataaaagtaaacatggaacactcccggcggagctttccgtccgttgttccaaaggtcattttcccccgctcatcaggacgagggaacgggggaaacagcgtttgaggaatacataaacgctccgcgccatcatgtaaaccgcgggaaccaggcaccaccacgcccaggcaggccatggggagggaaaacagctctctacgcccatcagggctatcagaacaaaaatatgggaacaatacacgaaaaagctgccggacgcccaccgggccagcttttccgaccagccggggctgacggcttttacaataattccgaagctgaggaaggccagaacaatcaatccggaaaaagagccgtccgcaatcaggaaagagtccgtacagcttacccagacaagacccacggaggctaaaagaatggaaccatgcacggcaaggggcatgttgccccagcggttcagacagcccggtgcggcggacgccagcataacgccgagcgcaaaatccccaaacatgtacggactgggccatgccagggagtcgtcccaccggtgcagaaacaggcaaaacaggccaaaggcgtaaagagctggacggaaacgggagagcaaaaacgcagccagggtaaacatcatcaagtctctcaggaaccacatcggggtcagcatgggacatgttcctagcccaaacacggaagccagcgaaccaggggcaagaggcatgcccgccgccagccaataggccgcgcaccagaaaagataaggccgcagcaaaaccagcaggcggcggcccgcccacgttccggccccctgttcatcaaggccggaggcggaaaaataccccgccagcaggaaaaacgtcgccagcgccggaccaatcagccattggttgggaggaaaccccatggaagggacgtgctgcatgataaccaccagcgtcgccagcagccgtgcaatctccacccagggcaaacgagggtgaatttctttaccggacgcgggggagacggtcatgacagccccattctggatgattgttttgaaaaagcactattttttattgattttatagacgaaaagcggccttatcgaccttcacaggcatcgtattatggaaaatacctgaaaatgatttttttctcatattttcatttatggctttatatttccatatgggaaataacacgcattccgagcgcaaggctgcatcaatacacactcccgcactggatattccctgattttgccgaaacagctgctgccacaccacctgcattgataaatggtgaaatgcatctgccatatattgcaggtgctcccagatggttctcccattgcaattccgtatttttcattcatcaatgccgtatgtcgcgaacgcctccccttccctgcccgatgattcgtaaaatcatcagcggctcctttggggaatcagggctgaagccgccgcaaggacctgaaggcccacaaaaaggaaaaaccagaaccagccgccttccacaaaaccgtaagagtgcaggccaatccccatgaggttgacaccgaaccacccccaggccgccacgatatttccgagcgaggcaagaacgaggaagccttgacaggaacagacgtgtaaaagtcgggcatggagggtgcaggagcaccaaaggagtgtcattaacgcaccgttttctttagggtcccacccccagaaccgtccccagctcatgtcggcccagatgccgccgagcattgtccccagaaaacagaagaagagcgccacgagaaggatgcgatagactccgcaggccccggctttcagcccctttttaccctgtccgaagaaacgggccaccagatgatatgaggctaaaaacccggcaaaaaaaacacttccgtagcctatcatgatggtcattacgtgcatggtgagccagaaattcgaattgagaacggcacgcatcatgcccatggtatcgccgctgtagggcaaattcatggctaccaggagtgagagaagaccggaagcgcaggcgaccgcggcaacaggaagctgacggcggagaatataaagcgtcccgccgaataatgaggctaccgcgcccgcaaagacgaccgaggaatacaaattggttaccggggggcgcgattgaatgtacatgcgggccgcaatgccgaataaatgccataataccgccatacacaggaagaccgtcgcaaaatgcagcaatgccttccgccgcttgagaaacagagagaccacgaaacaaaccaacgacatgccgtagagaaggaagcctcccaagaaggggtcgagagcattgatgcaatgctcgaaatgcagtttgaaagaatccatgggcagtattggctccaattccccagaaagttgacgcagagtctctgccgcagtagattcatctccggcagcataggcatcgcaggctgcggcataggctttcagggcggtccgcccggcgggactgagatttttttcgagcagagcggcagccggggataggtagcttccctcatgagggattactcgcagagccacattcgggtccgcttcttctacctgcacaagagcctggaggaattgaaaatagcgattggcacggtagagccggtcaagcgagggatggcgtttttcacgttcagcggcttcaagctctgctgaggcttcggccatagcttcatgccatgcatcaagcgtccccaaacagcccgatgtcccctccaggcggagagcgagcgcaacgccggcctgctcataaacggcgagtgcgcccagtacggcttccgcggcatgggcctgaggagaatttccccgcaaagagccgcgcagcaggccagccttctcaactgcatcggcataggaaaaataacggcctcgtccgccaaggaattcgaccatatccctgttatccgaacgcagaaaaggttcgctagccatttttgccgggcaggcgtttaatgccagcaaccacttcaccggcccggtccgagagcctccaagattcaccgacgtgcggccgcttgccaatttaagggaatccgccgctgcgcttgaaaccggcatcactcgtccagccttcaggcatggcagcgcgccgggtgagggcgcccctatgccgtcaaacgaggaaaaagaactaccaatcctctgaaaaagaggcgataacgcaatcgcaagagcaacgaaaaacgccgtaaataaagtaattttacactgcatgtttttttcgggcacgcagggttgggagaaaaatcagcagcatgcccgcaaatacgccggggaccgatatccacggaaaaaagcgcaccggattgtgtacggctgtgattacactcgtgcggcccccattggcgtaactgctctggtaaaaaatccagccgccaaaggagaccggagcattcatgcggataaccgtttccgtgctttccccgccgcgcataaagcaaacctcgcttgaaaagctgctggggatatcgcttcccgtccatgtccgggtatcaaattttttcagctttactgaaaaaccaagggggatattttttctcccattcccttcgcctgccagtatttcgtgtgagacctcacctgcatccagaacgagtattccctccgtacgcagaaaatactgcaacgcccccgccaaaatcagcactaccagaaaagcatgcgtgaggatcacgcccacgccgcgcagtgtgaagcgcgcacgccggaaaacagacgccgaaatattcagtacggccaatgcccctacgccagcgccgccgatcagaggaatcatcccgaaggaaaggcagccccagctttcaaaatacctggcctgcacagcggaaacaccgacagaccgcgcctcaagagtgccgagaaaaatgagcagcacggcgtaagccatcagcacgcacgcgagacggggagatgccatccactgcaaaattttcttcatcagcagatactgaatgaaaaagggccgcacgcctctgccgctccatccgggaaacggaagcatagggtcgtgcggcctgcttcgtgatgaataaagacggaataattattttttgtccgtaaaggcagcttccacttcagagatcatcttgttcagagaaatgatgccgccgccggaaagataccatacctgcgggtcaagcaggatgatggcgccgtttttagccgccttcgttttgttcacaagcacattgttgaggacattaggatttttggccgagcggccgatagctaccgaacggtccaccgcaaagatgatatcgggattgagcatggcaatgtattcataagtcacctgctgcccatgaacccccaccttgatgtttttatcagcctgggccactcccagggcatcgtgtaccaacccaaagcgggaacccgaaccgtaagcgcttaccttgccgtcgttcgtaaggagaacgagagctttcttgccgctggcctgggccttgtccttcgtacgggttacggcttcatcaatgtttttgacggcttcggctgccttttcgggcacgccgaacacatcacccagaagcctgatgtttttcttggcttcccccagctgatccttggccagagtatcgaccaggtaaacgggggcgatggaggaaagtttttgataataatcctgctgacgtcctgaaataataatcaagtccggcttgaacgcattgatggtttcaatattgaattccttaaccgttccaagatccgtatattgttctccagagaatttggaaaggtaaggaggaaggaattttttgggtaaagccagcgcgggagtgacgcccagttcaccgatggtctcaagcgaaccgtagtccagcacggcgacacgtttcggattgaccggaagctcgaccgtgcccagcgtgtgcgtggcggtgatcgttttggcttcatctgcggcggccatggaaagaccgggaagaatcaatgcggccagaaatgcgatgattgttgttctcatattatttgttgttgtttgttgttttgggaatttaaggaaattctattcatagtatacgcatatctttttatcaccatagggttctatggcgatatccataccgtaaatatcgcgcagcacatctgtccggatgatatcttccgtcggcccttgatggcacaggactccgtccctgaatgccaccacgtaatccgcatagaaagagacaaagttaatatcatgaattacgatgcagatcgtcttgccctgctcccgcaccagggaacgcaacagtttcattatgcgcgccgcacgatgcatatcaaggttgttcaaaggttcatcgagaaagatgtacttcgtgtcctgtgcaatggccatggcaatataggccatctgccgctggccgcccgaaagttcatcaaggtagcaatggcgcaaatcggcaatctcggtaagttccaaagccttttcgatttgcagaaaatcctgattttccaggcggccgcgggaatgagggaaacgtccgaagcgaaccagttcctcgaccgtgagccgcgccggagtatggagggtttgccccaggatggtgagggttttggcaagctcccgggaatcccatttcctgagttccctgccatcaatggatacagagccttcggtgggttccagaaggcggctgacaatgttgagcatcgtgctctttccggcgccattgctgccgatgaaggccaccatccgatcagagggaagcctcgtgctgacgtgcctgagcacgaaggtttcacggtattttttggaaatgtctcgtatctcaatcatatacgtttaattttcatgatcaggtagataaagtaaaccccgccaacgaaattgatgattacgctcaggggcacggagaagttgagccaccgttcggtaagcaacatgccgaaagtcaatgcggctacgcccacgagagccgtgccgggcatgaggacgatgtggcggtaggtcgggaatatgaagcgtgcaatgcttacgatgagaatgcccaggaaagtcaccggccctacgagcaccgtcgaggccgaggccagaatagagacgatcatcagggagcgcagcaccacccatttgtagtttacgcccagcgtaatggccgtggagcggcccagcgtaagcacgtcgagcttcctgaggtcgcaaaccagccagatgaccgccgcggcgatcacaagccctgccgtaagcagcagttcttcattgatgcggttgaaactggcgaaaaggcgcccctcaagtatggcaaattcgctcggatctatcagcacctgcatgaagttcgacaagcctccgaaggttatgccgaagatcatgcctaccaacaccacaaaataaatattgccgccattctgtccacggaacatgtagaaaaaaatacccgtagatacgcagaccatcagcagcagggctcccatgaaacagagcgggctctgcatggtcgtcaattgtgtgctgcccacgaagtagagcacgagcgtctgcagtaatacgtagaggttatccagccccatcacgctgggcgtgaggatatagttggttgtgatcgtctggaagacgactgaagacagccccacggccgttccaaccagcaccaacgcaataacgatgggaatgcggcgggccatgttaaagtcccacgtttcgggtgtcatcccctgaaagacatatacgagcgccagtcccacgcagagcagtcccagaatcaggaaggccgggaacgcgcgacagccactggccggcagcagcattgcggaaggcatcatctttttgatgttgaatggaatcaggcatacgtttttctatggaagagcatggacagaaatacaacaccgccgaccacgctcaggataacgccgctggggatttcgaagggggcgatgagcatgcgccctgccacgtcgcaaacaagaacaagcatggcccccagccaagccgtatcaaacaagattttcttcacggcatccccccggaaaatgctcacgatattgggcacgatcaacccgatgaaggggaggtagcctacctccacaatcgtgattgagctgatgatggatactatcaccagtcccatgcgcatgatgcttgcgtggttcagccccaacgccaccgcggcatcacgccccatgccggcaatcgtaaagagatcggcataaacataggccagcagcatcaacgggatgctggcatagagcaattcataattgccctcaatgacaagggaaaaactcccctgcagccatgacgccatattctgtacaatatcaaactggtaggcataaaaaacggctccggcattcaccacgccgcccagcatgattcctatcaggggcaccagaatgacattctggtgccgcacgcgcgcaatcaccgccagaaagcatgaggtgcctatcagagaaatcacgaaggcggcccccacgcgccaaatgggagaggctccgggcagataaaggatggcgaccattaccccaaagcggcaccactccatcgtgcctgccgtggtcggcgacacgaagcggttattggtgatgcgctgcatgatcaagccgctgatggccatgctgctgcctaccacgagaatgctgcagaggcgcggaatgcggctttgcaacatgatctcccaccagaactgcagctgctcgccatccatctgccacaggtcggacaaggacacttgagctgccccaataaagagcgaataaaaggcaaggccaagcagaaagctccactgaatgattctgaatgccattttctcaggctttcaacacggctgcatcaagttccatttcaaacaacagattgtcccggcacacatcggcctgtatgccgatgcagggcatgatggcgaggccgcggcgcagagctattttttcgtagtgaggggcataatccttgtctttgaaataggctacggagcggacgacatccttccagcccatgccgcgtgatttcaggatggcttcaatcacgtccagcgagagctctgtttgtttgtcgatatcgccgagatgtacggattcgccgccaggggcaatgctggccgtgccggagacgatgacttgccggaagagagggtggtccacttctaccgcacggctgaatgagctgcggtaatcctgagccgaacattgcagaggcgaagggatatcttttaccgtcacacggtcgcccttaggccgaatggcaaatacgcgggccgacaaggccgcatgttcccgattgccggaaccaatccccgtactggccggaaccagacgatcaaacacgccgcggctttcaaaaaatgtgtcgcgggcgcggttgaactcttcataccagtccagcaggcggttgttgtaaaaccatgtgcggaccacgtgggaaaaatccatgcaggcccggttcagcgcttcttccatctgccggaatacatccaatgtctgctcagtccgtccggctgtccggtcgcggggcgacaaaccgcccaaaacggcatactcggcatattcatcctcataaaaaaccccggcggtgcggccattaaactcaatcgcccgggcatttatcccctccaccgcgcaaatttgcatgcctcgatagaaggatgcgcccgttttcgtacccaaaaaggcagtcatccccgccccgggcaccgaggagagatccagatcagcgctgccgtacacttccgggccaatccaccgaaggccgcttttttcagctttttggagtaattcggcatgctcggccaactgcccaggttcgcttccggcaagcgtaacgaattgcagagatgcgccttcgccacccagcgggagcgacttgacggaaacacctttgtttttttccaagttgcaggtcatgagtatattatttttttaaagtgctttcaggaattgaatcagttggccgcgctcttcggcggagagatggcggaacatttcacgggagaattcgctttcaccgaaatgccacaggatagcctcttcaaagtcgcgggcgcgcaggtcatggaacatatctgtatgattggcggttttgtgcatcagcccccttccccagaggggcggcgtacgccagaaacgagaacgtccgcggttgatttcccccatatcgtgacgcagcatatccgtataggggcggatggtctggtttgcataaccgggaagcggcttatattcccccgttgtccattcaggcttgtggcaaccggcacaccccagtttattgaagagttcctgtccgcggcgcacgtcaggcttgtccaggttgcgggcggcaggcacggccagcccgcgatgccagaccatgaaatcttcatactgctgcattgagagttcctcttcctgcgggccttcaagaccgcttacatcaatgccaagttccttctgtttttcgagccattcgggcgtcatgtagatgttcggacggttcttgcgcgttacattcgtcacgttccaaagcgcattggcgccaggaccgttttccagtgtggcgcgcgagcagtcccacgtgaactttccgaggcgccgggtaccgtcgggctcgtcaatccatttgccaggaatccccttcaccgggcctgtcatgctctgctggcgcctgtattcggcaataatatcctcgtcacggatggcatcaagcagccccgttccgtaaatgccgattgttgattcgattgacacgcggtaatcggccggaagcggaagcaacggctcaatcacatctgccgtgggataagtcaacgtgccttccgtcggcttgcccgcattgtagggcgttccgtccgggtatttgtttccgtactggtcaacaaaatcatgccattctattttcacccccttggcataaggcacaaaaggaggaaccgctttcgtctgcagcatgcccgtgtaccccttaactggggtgccatcgggattatgtacaaaggccagataaccgttgccgtactgcctgtcaaaattgccggtgcgctgtccgcggccataaccggggtggcaggccagacaggatgatttaatgtaagtgggaccgagaccgccgaagcgattgcgcttcacgggtacgaagttcccttcaaaaataatttcgcccgccttgaaacgattcgtcaggccgccttcagtaattgccggcgattcctgctcaaacgctttactggtggcattaaacaccgttcccttttcaccgcccagatagtaagccggcccgggctcgccttctttcgtcctgagcgcggggggcgtgaaatcacggccgcggtttacatggcagctcacgcatgaagctgtcatgtattcggctttgatattgtcaaattttgatgcactcccctggaccggattaatcagtgcgcgtccggaaatgcggggatgtcccaaaacgctagcattccttgccgtgtccgggataaaagattgttcaggagccgcatccccagaatctccggaattcactattgcccaggcggccgctcccgctccgagcaccaggacagccgcaggttttgcaaattgtcgatactccatgtgcattgatgattggcaggctttccagaaatacggcccgtggtacacgtctccgtcagccgtccgacaatatggatattgcagcccagggtcttgccgaccctgggcaatgcgggttaaattacttcacaagaagttcctgaaccttgtcgaagttttcggaaagttccttgcaactgtcgatgattgccttgagctgttcctttttgtcgaggtttttcaccaggggcccctgtatggcgtcgaggctcttgaataccttggcgatagaacctttcacagcctggtcaaccttcgcggacttggcggctacgagaggggaaatcacattgtaggatttttctacgctctgtacgttgtggcgggagtccaccagagaagtgtagctgtaaagggattcacagtcggcggcgtcagccgtttcgtagggcttgcccacctttgaatcggctatttcgtcaataatgtccttgctgccgccgatgatttcatcaagcacttcagagtttgactcgtagcggctgcctgcctggccagcttttttgaattcccccgcataggacttgccgggttctatttcagcttcttcaagaatcttggccttctcttcgctgatcttgtcagaacccgcccaccaggcttcaagcgtgatggcatcctcagcaatcacctcggccacagcggcaaggtaggaaagctgtccgggcgtcagatcggcggccttgcggggctgcccatctcggaacagcaggtattcggcagcatggaaaccgcgcgtttccgcgccgagggaattgcggacgtaggcggcgtcaatcgttacgctcttgctgtccgcgtttttggcgacggcgtcaaggttcgtggtatccaggggccaggagtccagcttcgggtcaagattggcgaaagcagccggaccaaagaggaaggattccgaaagttcccacggcacgcgcgtttcaagaagaagcttccctgcttcagcaaccttggcatcggtaggagcagccttcagctctttagcggccttggcgaatttgagagcgttatcactcatcgtcttgtaggtgggaatgacaagctcatccgcgtaggcggcaatcgccgcgctcgttttgtccaccttgggggaagcggccttggccgcctgagcctggctaccgaaagccaggattgtacttccggcgcaaaagccgaccagcaacatgcgtttgtatgcgttcatggttttttattgataatgaaaacatccgtatcctcctcagggaggcatcctccaatccggcaggatttcatggcgtatccgccattttttcccgccggagcggaaaataataatccggccaaacgatgtcaattaaaaattagtttaaactaactttgcgacaaaaaacccctcttgtggtcgcatgccggaacatcggcatgttattgattcggaaatattttctatttccgaatgcgcccaggagccgcctttcaccaaattccgagtttctccgcgacaaggctccttacctcgccaaaagatttcactgcgggcggattttccgtatggcctccaagaaacttctccatccagatcatatggtaccaacggccgaatttgtatccgcaccgatgaaatttccctgcaaattgataccccaaacgtttatggaactggacgctgtcccgtgtaagataggggtcctcagcttcacagggataagcaatgcacgcgtttaaattcaaaatattctgcatggagagaatcttttccagagctgcatacagttcccttcccgttcccatttttttcatgtcttcccgcacgtataccgtcgtttccacagcccagcgatacgctgcgcggtccttgaacactcctgcataggcataaccggaaatatcccctgccctttccgcaaccaaataggggtatttttccagtacgtgatctattcttttttcaaactctggcactgcaggcacttcatattcaaacgtgacagctgtcttttccacatacggagcgtaaatttccagcagcttggccgcatcccgcctcgttgcaattctgattctgttgcttttcatttcggttgaccgtgctgggcccctgagccggaagcgctgccgatcattctaatatttcacaagcgattgtcaatttgaggtcgcccaaacacccgccatttccgggaaatatcatccgccgcatgttttccgccgttcccgttcatgaacgggaagaaacggggtcaatattcatttcaaaagcagagtaaaaaccgcattttttaccttgtccggttccccgtgtccatttatggaaagccctcccgaaaaagtgaaaaaaggccggagtccatagagaacccggccttttggaaaggataggatgccacttcgcggagaaatccgtctcaggagtaaaaaccgatgtccggttcccggtcccgccgcctgcgtttaaaatacggattgcggtagcggtggatgcatttgccggaactcccaggggtataatgaagaggggccgcctccttgacggcttcacggctcaatatctccacaaaatccttcaaggacatttccagatctgcatcgtggcatgccagcgcggcggacaggcgcactttgccgttgtcatagtccacatacatggcgaacagcgtggtctggtacaggtgccacggttccccgcccatttttccagactggtgttggctgatggcctccaacagccacgtcagcgcatgttccagttccagattgtccagaacatcccgtataagagatgtttcgcgaccgaaaacggccacgctttcctgttgtcttgccctgttgattttcatgtcttggttctcctttccggtttcccttgttaagcaggacggcggataattctgccgctccaattgttttggacactttttttcaacaggttgttcaatctgaattctcaactgtgtcagccatgaccactttcccaatgtacgggagttcccggtaattcccatccaggtccattccaaaccccaccaggaaatcgtttccctgcgtaaaagccacgtaatcagcctcaaaaggcactttccggcaacagtgcttgtccacggctacagcagtgaggacttccttcacccctcttcttttcaattcccggcaaacttcatccagcgtagcgcccgtatccagaacgtcatccaccaccagaacaggcacatcgggctggaaatccccgcaatccccctcccacgccacggaaccggaatttctcattccggcataactggaaatcttgacggctttcaccgcaggccgggatttcaaatgcttctccaacatcgcagcgaaaggaagagcaccgttcagcagcagcaataaaatatagggttttcctgccatggccctgtcaatggatgcggccagttccctgacgcgcgcgcagatggcatcctctgcaatcaaaggagtgatggtgtaagtcatggaaacggagcatgataatatttcctgtaagaaaatcaatccttaaagaaggatgaacggagacaaaacattcccggccgggctccagcaaattttacaagaagcaggactggtcttcatagtcaggaggcatcaaaaaagcgctctcaagattgtttctccgccccggtcggcagagaatgcggaggcgcatttaacggtggcttcccgccggaccgcatggtaaagtaaggcagaaatgactgattccccttccaagcgcctttttattctggatggaatggccctggcttacagagcccacttcgcctttttctccaatcctatccgcaattccaagggagtcaatacttccgccgtgtacggcttcgccaatacgctgctgggcattctggagcacgaacgccccacgcacatcgcggcctgtttcgacacttccgctcccacggcgcgccataagctttaccctgcctataaagccaaccgggaatccatgccggaagagttgagcgaccaaatgcccctgattttcagattgctggaagccatgaatattcccattctgcgctatgaaggctatgaggcggacgatacgataggcacgctggcacgcatcgcggacggtacggagggattccagacctacatggtttcccaggacaaggacctgggccagcttatttcctccacctgctttctgtggaaacccggcaaaaggggcaatgaccacgaagtgattgacctggcaaagctcaaggagcaatggggcattgaacgtgcggaccaggtagttgatattctggccctgatgggcgacagctccgacaatattccggggcttcccggcgtgggggaaaagacggccaagctgctgatcggagagttcggctccgtggaaaacctgctgtctaatacggataaactgaaagggaagcgcaaacagattgtggaggaaaacggggacatggcaaccctttccaagcaactggccaccattgaccgaaacgttcccctgacggtgaccctgcctgaattggttaaaagagaacccagcccggaagaactgcaggcccttctccaggagttggaattccggtccatgcaggccaagctgttcgggaaaaaagcgccggagcccagaaaagcccccctcccggcggacgatttgtttgctcccgcctcccggacggaacaacctctgtcggcggaaccctccgcccctgtgtcgggagcacggcagaacggttcgggacaaatggatttatttgaggaacgccatttgaaaacggtagatgatttcaggcacgaatatattattgcagatacgccggaagcccgttccgccatggcagccgagctggaaaagtatgattcctggtgcttcgacacggaaacgacgggcctgaaccccctcatggacaacctgctgggcgtctccttttgtgctgaaccgcacaaggcatggtacatgcctgtctccggtccggcggatctggaagcggtcaggccgctcctggaaggccccgcagagaagatagggcatcacctgaaatttgacctggaggttttgcgagccaacggcattcatgtcaaaggcccctttttcgatacgttgctggctcatgccctgatcgctccaggcatgaagcacggaatggacgttctggcggaaaatttgctgcaatattccacgattaaactgaaggacattgccgctccgggatcaaaaaaacgggaactggacaccagcggcgttcccgtggaagtaatgggcaaatattcggcggaggatgcggatatcacccttcagctttccgccgtcctgaaaaggcaggtcaaggaaagcggcatggaaaaactgttccgtaccgtggaactgcccctgcttcccgtgctggcggacatggagttttccggcatccgcgtgcttccggaatccctggaaaaggcttccgtcaaggtaggagccatcattgacggcctgcgggaaagaattgaagaagctgcaggccatcccctgaatctgaattcccccaagcagctcggagatttcctgttcggagaactggagctggtgaagaagcccaagaagacgaagacgggccagttcgtgacggatgaagacaccctttccgctctggccccccagcatcccattgtagcggatatcctggcctaccgggagaatatgaagctgaagagcacatatctggatgcgctgcccaagtatatctgcccgcgggacggacgcatccatacccaattccaccagatgctgaccgcaaccgggaggcttgcctcccaggatcccaatcttcagaatattccggtaagaacggaacaggggcgcctgatccgcaccgcctttgtccccgcctcagaggaatacaccatgctgtctgcggattattcccagattgaactgcgcatcatggcggctctttcaggagaccccgccatgtgcggagcattcagggaaggacgggacatccatacggaaacggccgcccgtgtgtacggcattccccgcgaccaggtggacgccgttatgcgccgtgcggccaaaacggtgaatttcggcattatttacggtatttccgccttcggtctctcccagaggctgggctgcccccgcggagaagccgccactttaattgaaaactattttacccagttccccgtagttaaatccttcatggaagacctggttcacaaagcggaacaagccggttacgcggaaacgctattggggcgacggaggatgattccggaaatcaattccgccaacaagaccattaagtccgccgcagaacgtactgccatcaacacccccatccagggcacggcggcggatatgattaaaatagccatgatccatgtggacaaattgctgaaaggcaccagatcccggcttatcctccagattcatgatgaattgctggtggacctgcacagggatgagttggatctcattcccaagatagaggaagccatggtcagcgcgctgcccctgcccaacggcgttcccattctggtggaagccaggacgggatgcaactggctggaagcccattaaaaaatattttttcaaaagactcccacgcgttccgcattccagaatttcctcgccttcccgatgccgtattttcccttccggccgtatcggtttccagtttgtggacgagttgtccctccaacgggaaatttttgaaaagaatgattccccccgcggcagaaaaatgggtgggaaaggatatccctttgaaaaaatgaattaaagaatcagagcgtccccagcctggaattccggaacggtcaccagggctctgccgtcttttaacgccactacctgcaccttgcgttcctgcattcctgacggcgtttttacctggatggagctgccggccctgacggcggaagcgggaatccacgcggaaacgggaacttgaacgttgatggctacttgaagagccatgttgacgggagccacttgccactcggagacatgggaggcattcggctccagggaggcaatcaacacggcggaattgcttttggaatccagcgccgcatccaccgccgtaacgcggcccagccactgcagccgttttccattattcagcacacaagaggcggtcagagccgtattcaccttgccctgctcatccctgggcaatgcggaaaattcttccagcggaacgggaatccgtatcatccgctcctgaagaggaattactttccccaccggctgcccggcgaccacgcgggcaccggttcccacagagcattccaccacctggcaggtatagggagcttccagcaccgtatcccggagggcctgttctgcttccgccacatacgcctccgcagcgttcagcctggcgtttacggctctgcgctgcggcacccggagcaccagttcggattcctttccgcttttggagacggagctgtatgtctttttgatggctttcagggcttccgcctgctccgtagaaacatccaggcgggcctgttccagttccgcctgagcgttcgccagccgggcgcggtattcaaatttttccaattccatcaggggggttcccttcaggacaatttcccccacattaaacaggggatgcactttgtccacctttccggaaacgctgggagaaagcatcgtcaggtaggaggcctttacgatgccgggcgcggaaatggaaagagtgttcgtctgcagccggaggggtgtctccgttcctgcgggcgcgcagcccctgtttccggaagaggaaaaagagacggacggctccgttacaatagccgtgcctatcagaagcgccacaatccccaggccgatgcctatggaccaggacgttccctttttttgaggggcctcgctcatcaacagctccgggggaaacgcgtcccgttatttgggatattccgtctccatgatgtgggaataggcctccgccgtttccacagccacggtttcaatattcttcatcaactgggcaaactgggcttccgtgaggtccatgccttccagaacgaaggactggcggtaataaacatacccgctgttggggtccagctgaaaggcgccagccgtctggtccgcattcagttcgctgaggataatgctgacttccacacggcggttttcaggaaccttggcggcaaaaagcacgtcaatgaccagcgtctccggacgttcaatcatggtgtacaggaggctcaccggggtgaacgtatcacaggggacgaatgcgatgcctgtcttaatgttgtggtcatcagcggaagtaatccattccgtctcttcccctctctttctgagaacggtgtacacacggtccaaaaggctgagatgctggttttccatattgaaaattgtttaacaggggggttgcttgcaaaggcgcatgcaacgtacgcgcccgtttactgaattcaagcttactggcatccttctgattcgtcaagctctcctgacgtaaagaaattgaaaaaacacgtatgcggacggcataaaaaacacagacgccgtccgaaagggcggcgtctggaaaaaacgcgtgcgccgggagttccggcttctttccgaggtcctttttacaggatatccccgggctggtaggccgccccgtccggaaacctgtccgtcacttccttcaccatggagcggaatgcttccacctgggcgtcagccatgcccgtagcggaggaattggaatcaaaaatgcgctgaaggtccgcccggtctattcccaggcgcccgtcttccgccaggcggtccagcaaattgttttccatgattttcccggcgcgcaggtcattggagacagccacggcatgttccttgatcacctcatgggcggtctcccggccaatgccgcgcttgacggcctccatcaggatggtggttgtcatcaggaaaggcaggtagcggcgcaattccgcagccaccacggcctcatacacgcccatctggttcaacacggtcaggaaggtttcaaacaggccgtccgcagcgtaaaaggaatcaggcatgactacgcggcgcaccacggagcaggaaacgtccccttcattccactgatccccggccagcccggaaatcatcatcaggaagcctttcaaaatgacgtggaagccgttgacgcgctcgcaggagcgggcgttcatcttgtgcggcatggcgctggagccagtctgccccttggcgaacccctccgtggccagttcatggccggccatcaggcgcagggtcttggcgaaggaggagcagccggaggtgagttccaccagcccggaaaccacggaaaagtccagagaacgcggatatacctgccccacattcatccacttggcagggatgcccaggtgggcgcacacgcggtcttccagttccagcacgcggccggcatcctgcccgaagagggaaagctggtcaagctgggttccaacggcgcccttcagtccgcgcacgctgtaacggtccatgagggaaatccaggcccccaggccgtgcatgatgtcttccccgaacatggcgacgcgcttgcccatggtcgtggtctgcgcggctacattgtgcgtgcgtccggcaatggtcacgtgcttccattgttcagccagggcgctcatgcggttcaacacggccacggccttgtcccggatgatttgcatggacttccaaatctggagctgttccacattttccgtcaggtcccgggaggtcattcccttgtgaatatgctcgcatccggccagctcgcaaaattcttctatgcgcgccttcacatcgtggcgcgtcacgcgttcgcgtgcgtcaatggagagaaggttcacctggtctttcacccgttcataggcctcaatcaccccgtccggaatatccagccccagatccttctgggctttcatcacggcaatccagaattcgcgttccagaatgatgcggccctctgcggaccagatggatttcatggcggcggaggcgtacctttcagccaggacattgggaatcacgctcatatcaaaatgtgtatatgcgggggttatcaaaaacggtgagccgccatgatcatgacggaagggaaaaaagcaagcactttcccgcagcttcacggattagggacgccggggaattccgccggacggcaaagcctcccttccatgcccctggtccggcattgcgcctccccgccaataaaaatttcaagaacaggcaaaaattcttattcccgaataacggaatcgcaacacctccgcttaccgccatgttccctcattcccttggcggcggctccaggccgtaccgagcataaccggagacgatttcctgaaggatggcggaaattttttccagggaacggacggggacgtattcatactttccatggaagttgtggcctccggcgcacaggttggggcacggcagccccatgaaggagaggcgggctccgtccgtgcctccgcgcacagggacgatttccggcctcactcccatggcttccatggccctgcgggcatgttccaccaggtgcatgtgcggaagtatcttttccttcatgttgtaatagaaatccgtaatttccgcctttaccgtcccctccccgtatttacggttcagcagagccgcacattcctgcatgaattccttcttgcgctcaaaggcctccctgtcatgatccctgatgaggtactccgcagccgcccgttccacatctccccggagtgaatccaaatgataaaagccctcgtacccttccgtaaaagcgggattctggaacgcgggcagcattccctggaattccatgagaaccaggcaggcattcaacatcctgcccttggcgcttccgggatgaatggaagagccctgcaccgtcaccactgcggaagccgcattgaaattttcgtattcaatttcccccagggcgcctccgtccacggtataggcgaaatccgcaccaaatcgcgccacgtcaaaggcatccgttccgcgtcctatttcctcatccggcgtgaaggcgatccgtatctcgccgtgaggccgttcggggttcagcaggaaggaggctgccatatccatgatttccgccacaccggccttgtcgtccgcgccaagcagggtagttccatccgtcacgaccaggtcctggcccaaataatccgccagttcgggaaaaacggcgggggagagcaccattccctgttctggattgagcaggatgtctccgccgtcgtacgagcgcacgatgcggggcttcactccgctgccggagactcccggagccgtatccacatgggccacccagccgatgacgggaacattcccctccacgttggaagggatggaggcgtaaacaattccggaatcatcatccagttccgcctgcgctcccatgtccttcaattccccggccaacaaccgggccagctccgtctggccgggggtggatggcacggtggcggaatccgcgtccgactgggagcccacggagacatacttcaaaaaacggtctaaaacggagatgttcatgggaaaaatcaaggattggcaagagtctaccacccgcccccgcgaacacaagcacaagacacggtttattcttgcgattcaggacggtgtgccgtatgtaaacaaagcttctccccatgatgactcctctcccccttggcattacccttgctttgtccctgacttgcggctccatgccccttctggcccaggggtcgtatatgcccggccccatgcccgccaccgccgggacaaagcaggatccaacggacatgtacctggaggcgttgaggctggtgacccaagccgcaggactggtggaaaaacgggattatataggagccatccgcctgacgcagcaggcggaagacaagttcggacgcctggctgagtcttatccccaatggcgtcccaacctgctgcaaacgcgccgccagctcaacagggaaaatctggaccagtggcagaagctggcccagcagcaggccgccgcctcttcttcatccggcctggagatggaacgcccggcctccgtgccgaagcgccccaggccaaaacccaacatagccctccctcccggctacaagggcgtggaattccctacccgtcccggagaatccctgatcaataccatcccgtccccttccgtttctcccggggcggctccggaagtggtggagagcaattacgaacgcatccgcagactgctggataaaaccaccatggagaacaatgctctgatccaggctctcaagcgcacccgccgggagcaggaggagattctggcaaaactggccgtggcatccgccggagaatccgtttaccgggatgaattgctcaaggtcaaaaagcagatggaggatgaaagaaagaccagcaacaagcttatccagactctcaccaggagagtggaggaactggaacaaaatgtcacctccctcagccaggacaaagcccgttatctggcgcagatcgccgatcttcagctgcagctcagggagtaccaggacaagctggacaaagtgacggatgagaaaaacgcccttcagaaagaccgggaccaattggcggccctggtggagctcaacagcccggacaaaacaaaaaacctgttggaccgcaacctgacgctggcggcccagctcaaggatgcccaggacaaaatcgccgctctggaaacagccaaatccgattccgaagaacagcggaaagccaacctgaaagcgttggaagaggcgcgtgaggaatccgcagacctgaaacagaaactgattgccatccgggatgaaaacatcggctaccgcaaacgcatcacagagttgaataccaagctcatcaatgcggatgtggaactgtccaagctggaggccaatccggaaaaaagcccgcttcttctggaagaaaaccagctgctgcgctccaccatcgccaagcagctccgcatactttccgtgcaggaccagagccgctccctgctcatcagcacttataagcggctgcatcaggaaaatccggacacggcggaaatagcctccctgatggacaatgaagaagccatcaagctcactcctgcggaaaaacaaattgtcaacgccattgccagggataacaatatcaatgttcccctgacggatcagcagaaggaaaaaatcaacaagctggcgcaggccctctctgcggaacgcggcaaggccgcccagcttgcccgggatttggaactggcgcgcagccagatgaagaccaaagcggacaaatccgccagaaacgacaagaaacaggcggaagccctggcgcgggcccagaaggccctagaacagaaaaacattcaggtggaggaactcacccggcagatggaagaactgaaaagccgttccgccgaacaggcccgcctggccgccatctccgccggaaccattactccggaccaggaaaaagcgctgaaccggagcatggaagccacggtacgccggaagctggaggcggaagccctggggcaaggcgccgcagaagccttcgccaaaaaacgctatgccgctgcggaacaactgtaccggactttgctggacttccagccggcccacgttccggccctggtcaatctggggaccattctgcttcagcgcaacaaggcggaggaagccattaaatttctgaaaaaagccacggaactggacgcctcatcctcccccgcatggttcatgatgggggtggcccaataccgcgtcggggaagaccaccacgccatcgcctccctgacggaaacggtcaggctggatccggccaacgctcccgccctgctttacctgggcaacctggaaaccagcgccgggaactatgaaaaagcggtggcccactttgaaaacgccctgaaaatccagccggaatcaccggacgcgcacttcaacctggcctggacctattcccggctgggccgcacggcgcaggcacgcaaaagctatgatgcagccatccgctgcggaggcttgccggattccgacctggagcttgccattaccggaaccaccacccttccccgcaaaaaacaggctgcggatcagaatcccgcatccgccgcaaaagaggacggcccccagctggctgcggcaataagcgatccgtctgccattccccacgatgccaatgaagtgcctgctcatgtggcggaggacccaaatgcgcaggaaaagccgtccgccggtcccaaacaggtcgtcgtcagccaccgtccggaaaccgaacccgtctctctggcagcccaaatgagggaaactgcccctgcggcggcatccgcacaacctccggcagaagccgcaactgccgcaacggaaacgcccaagccggaaaagcaggaacctccgcgcaggaaaagccgtttccgaatcggttcctgatggaattcttccctttctcactaaataaagccatgtatcacgtttccattttaggactgggcctcattggctcacggattgcacgccatatggccggaatgggcgacaaggtcaccgtctggaacagaactccgcgggaagattttccggaagcggttcctaccccggcggatgcggcacgcgcttccaaagttatccagctctacctgaaagacaggaatgcctgtctggaagtgtttgaacaaatgagaggggctctgacaccggagcatatcattctgaaccattcaaccattgacctggcgaccgtcggcaaactctccctgatgagttccgccatcggctgcacgtatgtggattgcccgttcaccggctcccgtttgcccgcggaaaaaggggaactggtttactacgttggcacggattccaccacactgaaccgcatacgccccgtgctggagcacagttcccgggacatcctgcacctgggcggcatcggagcctgcaccgtcgtcaaactggtcaccaacatggtctccgccaccatggtgcagagtttgggcgaagccctggccatctcccaggcgtacggcatttccccggaaatgctgggccaggccatttcccggaacgtcatcgcctcccctctggctgcatttaaactgcccctgatggcaaagcgtgacttttccacccatttctccctggacaacatgaggaaagacagtatttacgctcaggaacttgccgcagaaaaaggaatccacccgcctgttgccgccctggtttcctccatcatggggaggctgtgccgggaaggtcgcgcggaagaggatttcagctgtctggcggaacaattcgactaactttttccgttgatgaaattcaggggaacatgcgtctttctgttgacggctcttcttctgctccctgccggccggggacaggaacgaaaggagcctggcaatgattcttccgcggaagtgcggcagacggaagaagaatcagcatccgtccaggatgcggattttattgatgacgcctcggaccgtccagtattgcagggcagttccaatgtaaaccccgtcgttcccccttcaccttcggcaaggaccgccgccggagcggaggaacagcccgccaaaaggcagccgttcaccagcgtttccacctccaagcaattccacgtcaccgggatggactccctgctggccggggccatcgccacccgggcggatgccatacgcaccgcgctgctaaaagtcctcaagcagcctgacgaatggaaaaacggcatcaacatccgcctggtaggagagccgggaagccccgttccggccaaccctgtccgcatgcaaaccgtcattgtaggcaataccctctcctatagcattttcattcatctgggccacggcatcaaccaggacagcctgcgccgcgccatcgtctccaccctgctttatgaaatgatgctgcgcacggtggacccggaaggcctgccggacaacgtcacgctgcccccctggctgattgccgggttggaacaggctgttctgtggcacaataatgaagctgaccgcgccatgtattccaccctgttccagcagtccggcattatgactccggaagaaatcctgaattgccgggaaccggaaaaggaactggatgcgacctcttacgcggcctatcaaacttcctgtggagccctggtgctttgcctgctgaaccaggaaaacggtccggaaggaatgaaacagcttctggaccaggctattctgggcaatgacgatcccaggaacctcatcaaacgccattttccgcagctcagcctgacccccacttccctccacaaatggtggacgcttcagctttcccgcatggcgacgcctcccctgacggaaactctcacgattacggaaacggaacgtcatctccaggaagcccttaccctggtcaagtatgatccggatacccgcaccaccgtcacatttcccctggatgacctggaacaggcccgttccctgccggatctgaacaggcagctttccaacgtggctggcagcctgctcaacctcagcaggcgttcctttccttcataccggcccgtcattgtagaatatgccaagctggtggccctgatgcaaacagggaaagtcaacagccgggaagccgtccccaaaatcagccaacttcgggaaataagaaacctttccatgaaaaccgcccgccgcgtccgggactatatggactggtatgaaatcaacacgcggtccggaaccggcaagacattcgcttcctacgcggcagccgtgaaaatcctccgggaacaggaacagctagccaatactcctgtttcccgctacctggacgacattgaaaaactgtacaccctcccggccagggctcccgtgccctccctgcatgggaaggattaaggaattaaggaaaggcgttctgcggcggagccatcctgccgtccccatcaagagcgccgcacttctaaaaaacagcttcccgtgccgtgcaatgttctatcttcacggcatcacaaaatgccgatgagttctccccggaagccggatggtgcggaaatctggtgctatgaagagaattgcttgccggaacatgccaaatcaccggcagaaaccatgcatcacgtcatgaaccaatagactgtccgtcagcgttttgaatcattctctgcatcagcgctcatctccgccgcagaaacgcgcatttttttatgtggtctttttttattcagaaagattcagggattgtctttcccaagatgatttgcaatcatcaccccgaattattttcatatcactacataatatggacacgtcattgaaactccacggcctggtggccgccgtacacactccgttcaaggcggacggttccctgaacccttccagcgttgacgcccaggccaagctgcttgcctcccagggcatcaagcttgctttcattaccggcagcaccggggaatcctcctccatgcagcttgaagaacgcaaggaaatctattccgcctggaaggaagcctccgccaagcatggcgtggaagttatcgcccataccggttccaacagcgtctgggacgcccgggaactggcctcttttgcccaggaatgcggattcgtggccaccagttcactggccccgtcctactacaagcccggcactgttcagcgcctggtggaatgctgcgccttcgccgcctccggcgctcccgacctgccctattattactacgatatccccgtgctgacgggcgtacgcttcaatccggtggatttcatcaggctggccaaggaacagattccgaatttcgcaggcatcaaattcaccaatccggatctggccctgtaccagaccacgctgaattacgacgagaccgtggatattccctggggtgtggacgaatggtttacgggcgccctttccgtgggggccaagggcgctgtggggagctccttcaactttgctccggccctgtaccagaaactcatgaaagcctttgcggaaggcgatgtggaaacggcgcgcgactgccagtggaaatccgttcaaatgatcaatatcctggcctccaagggctatatgggctgcgccaaggctctgatgggctggctgggcgtcgatcttggccccgcccggcttccgcagggcaacccgaccgcagatcagctgaaggaactccgttccgaactggaaggcatcggcttcttccagtgggctttaaactgaaccccggaacctgactgacatggctgcaactcttgatatgccctctttgggcaagttctaccgccgccagcttctggaagacgttctgccgttctggttcccccgcgcctacgacgaaaaaaacggtggtctttaccactgctttgacgcagacggcacgctggtggactccgacaaatccgtctgggcccagggccgcatggcatggatgctgctgacgatgtacaacagcatcgaaaagaatacggactggctcaaatgggcggaaagcgccttgggattcctgaaaaccaagtgcgttgacccggcggacggccgcatgttctttcatgtggctgccgacggcacccccatccgcaaacgccgctacgcctacagcgaatctttcgccgccatcgcctttgcagcgcacgccagggcgaccggcagccgggattccgcccgtgaagcccgccactggttcgacatcttcacggacaactgcttcactcctggcaaaatggttcccaaattcaccggggaacgccctacgaccggtctgggcacccgcatgattaccctgaacacagctcaggaaatgcgcaagtacctgggagatgacgacggcttctataccggctggacagaccgctgcatcaacgacctccgcaccctgttcatgaaacctgacatccaggcagtcatggaagtggtgggaacggacggctccatcatcgaccacttcgacgaacgcaccctgaaccccggccacactacggagggtgggtggttcgtgctggaagaagcccgccatcgcggcaatgaccccgaactcatcaaggtgggctgcgacatgatcgactgggcattcgcccgcggctgggacaaggaaaacggcggcatgctgtactacacggacgtgtacaacaagcccgttcaggaatactggcacaacatgaagttctggtggccgcatgatgaagcgctcatcgccatgacgctcgcctacaagctcacaggggaagaacgctatgccatccgtcacgacatggtgcgcaactgggctttctcccacttccaggacattcagcatggcgactggttcggctatctgaacaaagacggttccagggccaacaccctcaaggggagcctctggaaatccttcttccaccatccccgcgccatgtggtgctgcgcccactactgcggcgccatttaagaaggcgtcaggctgtttcccgtcaggcggtcattccatatccatggaacggccgcttttttatgccctcaataccaaaattcagagggttccggataaaacaatctatccgtttttccaccctcaacacaggataatatcctccgtccgcaccaccacatcgccgggatccagcatggcattaatcagggaacagaagcggaatttgcctatatcttccgcttttacggaacattcctgaatgtctccgcgggacagcaggaaggcgcgcttggttcccgggagcaggaaagtttccggagtaacccaggaggacccgtccccgaacaccacgttgctgtaccgcgtatccgtcaccatcccgttccggagaatcagcgcttcttcgtcacagcccaacgccgcccctgccgccagaagccctgtccgatcctcccacttgcatgagtaatccagcccgggcatttccacacacgtcagcgtcttcacctgccggggacggtagggctcaaaggaggtgcggcgcacccttccccgcgtatcatacgtgatatggcatttgtaaacaccacggccctccgggccgggacagtccgaaagaacggaagccagatcggggacggaagctccgtccgaaccatgaacgccgatggcggcctccatcctccgctggtgccagggaagcaggcagggagcgccattctcccatttaacggtttcaaaaatcaaacggcacataaactttggcaacagcttcctggtattcctcttccatccggctcatgacggtaattcctccaccgctcttgtataccattccccgttcatcctcctccatgaagcggatggagacggcggaatccaaatcccgcccgttgaaaaagccgaaaattccggtataaaaccccctctccatatcctccgcttccgcgatggcccggcaggtagcctccttgggcgctccggtcacgctcccggcaggaagcagcttcagaagaatttcccccaggcgggaacgccagttttccggcaacagcccggaaatctcggaactgcattgaagaataggccctttggacgtttctacagggctgatatagcggtaacgcttcaccctcacgccggttgccaccatggaaagatcattgcgcatcagatccacaatggtggcggattccctattctccttttcatccgtttccagccagcggcgcgcttcctgcgtagcggacggaaccgttcccttcatgggaaacgtggaaatggagcggccgcgcaccgtgacaaacggttccggagaaaagcagacgcagccgcggccgtgcactccggaaatccgcgcgtccggccccagcagcatccggtaaggcgcgcgggcaaaccggaacagatggcgcagcgtcaggttggtttccacgggggtggacacgcataaattcagcaggtaggaatcccccctcatcagatggttccggacggaggcgaaggatgccgcataccgggacacgggatggggggatggaatgaaccgcagccgttccggaagcggagggccgccgtcctgatttcccatcgtgcccagcggcagggaaaaagcagccatgcgctcccccttcgtttccgaaggttcaaacagcaggttatggcccatatcatgggagatgacaaaaaagaacggacattccgcacggcccagggcattcatgcggctgatggtctgttcccgtgtgtacattgtcgggaattactctatcatgtgcgcgccatgagtcaaccgaacgtttggatcatcaaccaccgggattccttcacctggaatcttgcggaactcgtcagaatgacgggaatggccgttccgcgcgtggtttccaatgaatccccggaactggaacaggcggttcaggcgggggaaaagattatcctgtctcccggtccgggaacggtggaggatgcctgccaccgggccaccttccgtcttctggaccgcctgccccgctttaccccggtgctgggcgtatgcctggggcatcagatcctgggcgtgcgcttcggagcccgtctggaacacctttcccagccccttcacggagcgcgggaagtcatatgcaggacggagcagtgtcccctcctggaaggattgccggagcaatttcctgccgcgctttaccattcctggcgccttgccgcttttccctggccgacggagctgattgtcacggcgagggattccgggaaaaacgtgcaggccatccgccacaggcacctccccctttacggcattcagttccatccggaatccatcctgacgccggacggagaagcgctgctccggaacttcctgtcccttccggcaggcagcagggaaaaacggcgcatcaaatgattcaattccagccgcctggcatcagggatgaacgggacaagaccggaaagtgtctcactcccgtgcggttccggttcccatgcccggccgcttcagagataacgtttttcacctttatgaatgcacaggacgaactcaagatcagggacatggaaatcctgttccagcccttccactcacgcaagctcagcactcccacccgcatcgtccttccggccatgacccggggattttctcccaacggggttcccacggaccaggtagccgcttattacaaaaggcgggccagacatgaagtagggctcatcatcacggagggcactttcattgacgagcccagcgcctcgccttcctccaactatcccaatttcttcgggggcgcttccctgcggggatggaaaaaggtgctggaagccgtccacaccacggattgtaaaatagccccgcaactctggcatgtgggtatggcccggcccttcaagggagaaaacctgcccaatccggagttgccgcccatcggcccttccggaattgacgtaaacacgctggaacagacggtggaaccgatgagcatcgctaaaattgaggaggttatcaatgcttttgcgagggcggctgcggacgccaagcggctgggttttgacggtgtggaactgcatggagcgcacggctacctgattgaccagtttttctggaaggagaccaacaggcgcacggacgaatacggaggcgacctggtaggccggacccgttttgccagccgcatcatccatgccgtccgcaaggcagtgggcagccagttccccatcatcttccgcttctcccaatggaaaacaggccattataacgccaagctggcgtatacccccatggaactggaagcttttctggctccgctgacggatgcgggcgtggatatctttgactgttccacgcgccggttttgggaaccggagtttgaaggtacccgcctcaatctggcaggctggaccaggaagcttaccggaaagcccacgatctccgtcggctccgtggggcttaagggagattttacgaatgcctttgacggcgggccggaagcggaggccgccagtgtggaacctctggcggaacggctgaaagcaggggaatttgacctgattgccgtaggccgcgccctgctggcggatgcggaatgggcggaaaaaatacgccatgcgcgggaaaaagatatccacctgtttacgaaggaagacctgaaaacgctgaaataacggatttgcctgaccgcaaggatgatgcgggaactcactccgcaaagccgggaggggcaaaaacgccaggccgctccaaaacggaggagccgtcttctttccccgtttcctcagcaatcatcattcccgcagaggagattcttttatttcttcctgacgcggacagtcaggtacaacagccgcaaaagagccaatgccggaatctgaagcgtcagcaaataccacggagcgggcccgaaatattccagtacggtccctgccggagcataccgggtaaaaccgtaattcgtatccagccagatattcaccggaataatacaaaccaggtaggcgtcgcacaaacccagcgcccgcatgtcatcccacggccgcgcacgccattgcaggacggcgggaaggtaaagagcggaaatcaataaaagcccatgcccgatgaaaaaggcgaaaaaggcggcggaggggaaaccgtcgtgaagcatgggggtaatcaatccctggacgcttgccgtcagcacgccgaaatacgccacggcgcatgcccagggtgtacggaaccacagggcgataaaacagaccagagccatcagactgcaaaaatgcagcggaagcctgtcctgccagggctcccaatgttctctgacgatgcggccgaatgtttccatcaggaaagtcagcaggaaaaagcttcccagaacctttcccacaagcaaacggctctctatccggagccgcaagcatccccacaggagcccccctgctgccagagccacgatgcccagggcagcccagtgcggcaggctccaacggacaaacaggggcgcaatttctccggtcataaaaaaatccatcaacgggaaggaggaggttccgggcacgcatgaagtttggcgctgacggcctccaccttaagacgcagaacacatacggaacggaccatgccgggggtaaaatccgcatccctgcccgtctggtgtagcatgatgcggcgcaaggcatgcatcttttcctcatcctcccggagaaattcgacgacgccacgccccatgacgcagccgtaggcgtaactgtaccggcacgggacatccccctccagcaacacatgatccccatccatttcaaaagaaacctccggacggttttgcaggatatccagcttcctcccttccctggcgcagtggaaaaacaggctcagggaaccatttttttcttcatatccgaagttgaggggaactacatacacctccctgccgtcccacagtcccaggcggcacaccttgaaccgggcgaccatttccatcaaatccccgtgccgggtcacttccctgtcttttcttctcataagttagcgccctccatccattcattcatgcaaagggcggcacgtccggccagcagggagccattccgtacggaagccgcccgaagtccgcaaatatccgtccccgcctgcatcaattcacaggcatggccggtcagccactcctccatccgggaaacatccgcctccacatggaactggagagccagggcatgcctccctacgcaaaaagcctgatggggagttacctccgtggatgccagcaggtgcgctccggaagggacatcaaacgtatccccatgccaatgcaggacgggcaccccctccagataacggagaggggacaaacgcccgtccccgactttccagacgcatgcggaccaaatccagttccgtcttcaaatagggatacgattccgtatcccccacccctacgggaccgcccagcaccacgcacaggtcagcctccagccattcccggacggaaggacagggagcgcccgcccgaatgtaccgtgttcggaagcccctgttcctgaaaagaggttccagcgtaccgagatcttcaaaagccacatggcgcagggccaggcaagtgcgggatgctgaacggctactcatggcgacgaaggatgaacctcagcaaggaatatagaaaaaaatcctccgggaaaagctttttgccctcttccctccgcatttccggaaccaggatgtccatcatgaaacggaaatatccgccacatccgcaaaaaagccctccgccgcacggcataaatccacaggattcaattcaatctggcaccccagacgtccgccgctcaccaccatctccggcagggcttccgcgctggcatcaatcaccgtagggtatttccttttcatccccaaagccgtgcagccgccgcgcacgtaccccgtcacggcggtaatatccttcaccggaagcatggaaagagccttttctcccacggtgcgggcagcctttttcaaggaaagctccgcgcctatgggtatcacgaacacgtaatactgccgaggagctccctccgttaccagcgtcttgtacatcttctcctccgccaggttcagtgcttccgccgtatgccgcgcatccacaaactcgcggcattcataggaataatgcctgtacgggatatgcagcgcatccagcaggcgcatagcatttgtctttgcctccttctttttggacataaacttgaaaagggaacgtcccggtaacatagaaaaaaagccttcctttgacaaggccgagccccccgacggcccctatgaaaaagtggaacggaaacgggaatttctctgaaagagcggtaaggacagcaacgccgttcccccagtgcagcccgttcacagcggagaatttcagaaacggaggacggcgaaaaagaaaaaggaaaaaacgcctcatttcctcagaacccttgacttgccgctggcagaaaagataacatccggtatcatggaagattatcgtgtccggagaagccttggagaacatgtcctgcgctgctccgtcctgattgctgcgctcttcatcatgtctctgggcatcgctctgtccaccaaggcagacctgggagtctcccccatctcctgcacgccctatgtgctcagcctggcattccctctaaccatggggaccgtcaccatcctcatgcacctgagctttgtggccgtgcaggcggccctgctgaaaaggcaattccgtccggcgcatctgctccagattcccatagcttttatcttcggctttctgacggatttttccatgtggatcatagcgcctctggaaccggacggatacctgtggtccgttattctctgcctgttcagctgcgtggtaatcggattcggcgtctttcttcaggttaaggcggattccgttcttctggcaggggaaggcatgagcctggccttcgtcaaactcttcaaatgggaattcggagccgtaaaaaccgggatggactgcacgctcgtctgcatcggcctggcctgttccctcatcttcctgtccggactgacaggcatacgggaaggaaccgtggtggccgccgtcctggtgggaatgattgtccgttttttcaacaggcacgtcttctggccggacaggctcctggaacggctggcgcgccccggagcagcaagcgagcttcctccgctggtacaaacggccgcttatgctccggacgcccctctggtcatttccattgaccgggaatacggttccggcggccatgccatcgggaaaatgctggcggaaaagctgggcatccgattctacgactcggaactggtgtacctcacagcctcccggagcggcctcactccggactacatccgtaagcacgaacaacagctttccagccgctttctgcacgaactttacgcccagaactatgcctacacggcggaggaaatgcctcctgaagacgctaccttcctggcacagagcaaagtcatccgggacattacggccagtcaggcatgcgtcatcgtgggccgctgcgccaacttcatcctgaaagggagacccaacctgttcagtgttttccttcatgcggaccgggccacgcgcatgcagcgcgttattgaaaactatggggtagaatctggcggggcagcccgggccatggacatcatggactcccgccgccgcacccactgcctgcactacaccgggcaggaactgggcaatgcacgcctctacgacttgtgcgtcaacacgtctgattacggcatggaacgcacggtggaactgattctggaagccatcaataccagaaccgaacaatcttccgctgtagaaacggttcccgtccgctccgcatcttttcccgaaccggaagaggacagcattcccggagaaatatccctcgcctgacaggggcaaatgtatccagcagccaatacttatgtaacaactgcccgcccggcaccttattcaccggtaacagaatccgttgtctgaaaaaactgcctggccgataaataggaaactctttccccctttccataatccccgcaaagggaaagattccgtatctccttcagatgaaaaaccggctggaaaacgaatggccccttccacacaaaaggctgcccctcccaactccccgtttttttgccggctgcataattcaaaacaacaaaaggcagcctttctgagtccaaaaaacatgagactctggtcactccacccctcttacctggatgctgtcggcctggttgccctgtggagggaaggcctcctggcacgcaaagttttgcaggggcagacaaaaggatacatccatcatcctcagctcttccgcttccgggagacggaaaaccccattcatgtcctggatttctacctgaaaaccgtccatgacgaatccatccgcagaggctacaattttgatttaagcaaaatttctccctgcgaaagccgtcccccttcccttctcctgccggataaacagctcgaatacgaattccttcatcttctggacaagctcaaggaaaggtccccccggcaatattccctgctgcagcaaacggcctccattcttccccaccccattttccaagtagaacccggagatatttgctgctgggagaaaaggcttttttataattaaaacgaccgcatttcccactccgacaacggttttattccaataaagccctttgtctttttaaagcccatgcggtgagggaaaaggctcatggcctctgaaggatcggcagccttaaaattaatttgagaaagaatagcacgaggcatacacactgacaaaatggtctgttgcaccatatgcccagtggcctgatccaatacatccgtttgaacatgcactgccacccttgaaagcggcaagaatgaaaataattcacgggcaattcttaaagcacatccacatacgtagtcttgatacagctcacaaaacctggtccggggcatatttttcacgcttaacttgcccctggcagtaagggtcttaatctgtttgggaacaacaacctctccatctatcgtcaaataaataacagcagtatcagaatcaggaattgcaaaatgaatctcgcatcctatttcctgaatttcattcaaagggttaatttccaaaatagcctgctgataggctaaagtatctccccgattaatagataacgccagttcatgaagcgccgaccactgactgaatttaagctcataacactcaatggatttttgataattatactcatccatttgcttcgcatgaacgactttttgttcaagatcggatctgattttttcaacttttccgcacatgcggtggaaaaacttaggcctgtacatcctaagtttttgcatagcaagacgttcttccttatcgttttttaccggatacgccggagggggctgattaactatttccccccagtcaaacgaatcgcctacttcatgatgaattgtagttaattggctgatacgctcctcaaatttttcgacttccatttgcgctctcactaattcatcatgtttttgctgaagagccaattcccttagggccagtttttcctgccttgcggcctcacgggccgctcttctgctcgctgcttcgagttctcttaaaagtctgctgatagttgccatattcttaaaacaggaactgttttacctaatttgtaaagactataaagataatctttccggtatagatcaattcctcatgagcatgctctttaatccatgcctggcaaaatggaaaaggccttaaagcgtttgtgctttaaggcctttatttggtggagcatagcgggttcgaaccgctgacctcttcaatgccattgaagcgctctaccaactgagctaatacccctttgactttcgtcttggtgcgtcctgttgaggacggggagaaattatcatttccaaagcgggcatgcaagctttttctacaaaaaaattgccccgggatgttttttccggaaaataatgaatccggaaagggctgcaaatcccatacagacgaaaacagggacagtctgaacaaatatgtttgaatgagattcattcctgttttacctttgcataaatgatgaaacgtcctctttttattcatcgtatgatattcgcctgcgctctggcaattttgttcctgtcctgttccgttcacgcccaggaaactccagctgcggaaggaccgccggcccagacggaggacagcggcatttccactccccgcagagtcgccggactgggcgttctggcattcctgatcggctggatgatttggaggagcagttccagccgccagaaggacggaggccatgaccaggaggcaccccgggaatgacgccgtttttgaaaggttgccctggttcctgccgtagtcgttgcaggaaaggagtctccggccatgaacattattctacccatcctgagctttctgtgcggtgtcatgctgacggaaacagcttccggctcttctgaggagggaaagccttctcccggcgtagtgcaggaattgtggttcggcattccgggggcatccgtaaaggacctgacccacaggaagatttttgaaacggcagccccggatgtccgcacgatcagccatctggatgtggaaaacctgggagacaggtacggagcccgttactccgccctgctgaaagtcccggcaagcgggaagtaccgcctttacctgtcttccgacgattccgcagagttatggctgggcaaggatgcctcccagaaggacatggcctgcatcgccaccgtcaaaggatattccgacatccataattggggcaaccagcccaaccaggcttccgaacctgtccagctggaagctgaccggttttattttcttcaggtgattcacaaggaggatggaggcccggatcacatgtccgtcgcctggtccgggccgggcatccccgcccctgtcatcatccctgccacggcgctgttcataccgcccggaatcttgccggaagaaaaaaaacaatccccagccaaagcggactgaaagattttttgattaccttcccgccgggccttccctattttcaggggacatcatcaatttgccgacgagaaaataaatattttccataaaactccatcaatcaatcatttccaatacgaaaaaaaccggacctccctccatcggggaagcccggttttttctcgtcgtatatcatgtagttaattgaagcggcctgacacagaaaaatgccaaaacaccttctgaatccaaatctagcggatttctaatccgcaaccttcatgatgataaaaaattttcagggagagaagtgtttctcctctgagaagcaatgccgttcattatgaattcaaagagaaggaaatctttgaaaacaaatgattcccggattttgaaacgacatgaatagcaaaaattcctttttccttctcttggaatcttatacttcacttgaaaaagagagaggtttctgctccaagatggatagccccgtgaagcatcgggactttttctcaaagcctttcctttcaaactgggaacttgaccgcggattagaaatccgctcttcatttctggaaaagaaaatgtttctttatcgggtaatattcagaatgcctgccagtaaataatgttactgaaaaagcacgctttcatcccttccctatgttcggcatgaatgaattttccgctattgaaacataaatagttattcctgttatacacatattattatcattttattcacaattcttcttcctttttctccagtccccgcattctttttcctgggaacagcgtgaaacaggaaagggccatacggaaacggaataaaaaaatggaaatttcccatccttccagaaaatccaaaatgaaacataaaattttcacaggcgtttttactttccgtaaatcatccccataccttttccattcccttgaaaacaggttcctcccatttccccggaacaacacgggaaaaacgtgacgacaattgtccttgttccaatgacggacggacggtagattttccgcgccatatgagcagagcatccagaacagaacgccttgattacctgaaagaccagttacgtaaaagggttgtcatcctggatggcgccatgggcaccaatatccaaaaattcaggctgggagaggaagattaccgcggagaacgttttgcggatgcggcacgctatcccaacgatttaaagaataataacgaccttctggttctgaccaggccggatatcattcttgatattcaccgccgctttctggacacgggacggacggatattctggaaacctgcacattcggagctaccagcatcggccagcatgattatttctggcatcgtccggaggaaggcagccacaaggaccagcagtatttccaggaggtggtggacgcccccgaattgaaggcccttgtccgggaattgaacctggcggcagccgcactggcccggcaggcatgcgacgaagcggaagctgcagacggcaagccccgcctggtggccgggtccatcggccccatgcccgtcacctgttccctgtcccccgacgtgaatgatcccggtttccgcgccgtgaatttccgccagctcaggcaggcgtaccgggatcaggtgctggccctgctggaagggggggtggacatgctgctggtggagacgattttcgacacgctgaacgccaaggcagccctgttcgccattgaagaaatttttgaggaacaaccggaaagctctgttccggtcatggtatccgtaacgctgacggacaaagccggacgcacgctgtccggccagacgattgaagcattctggaactccatccgccacgttcgccccttctccgtaggcatcaattgcgccctggggccggacctgatgcgcccctttgcggaagaactgtccggactggcagactgccacatgtccatttatgcgaatgccgggcttcccaacccgctcagccctaccggctacgaccttctaccggcggatatggcccggttcatgaaggaatatgcggaccacggcctgctgaacatcgtgggcggctgctgcggaaccactccggagcacatcggcgccattgcggctgccgtggaaggaatgcctccgcgcgttccggctccccaaacgcccgcgcttcgcctgtccggatatgaagcgtacaaccatacgcgggaaaaaaacaccctctttgtcggggaacgctgcaatgtggcgggttcccccaaattcgcccgcctgattcgtgaaggaaattacgaggaagcggtatccattgcccggcagcaggtggaaaacggcgcgctggtattggatttctgttttgacgacggcctgatcgacgggccgcaggccatggtccgcttcctgaaccttgtttccgcagagccggatatcgcccgcgttcctttcatggtggattcctccaagtgggaggtgctggaagcggggctccaatgcatgcagggcaagggaatcgtgaattccatttctctgaaggagggggaagaagaattcctgaagaaagcggcgctgattaaaaagtacggcgcggcggtcgtggtcatggcgtttgacgaacaggggcaggccgccaattacgaggaccgcgtccgcatctccagacgggcctatgacttgctggtaaaccgggtgcagtttcctccggaagacatcatttttgacccgaacgtcctgaccgtaggcaccggcattgcggaacacgccgattacgctcttgatttcttcaaggccgcaggctggatctcccggaacctgccgcatgcccacatttccggcggcatttccaatgtctcctttgctttccgcggcaacaacccggtgcgggaagccatgcattccgctttcctgtaccacgctacgcagcaggggctggacatgtgcatcgtgaatgccgggatgctggaggtgtacgacaatattcccaaggacaggctggagctgattgaagacgttctgctgaaccggaggacggacgccacggaacgcctgacggattacgcggaaaaactggctgcggaaaaaaccggagacggaaaggagaaaaaaaccgtacaggcctggagggagcaggacgttgccaaacgcctggaatattctcttatcaagggcattaccgaatttgttgacgcggatacggaggaggcttttcaggagctggggtccccgctgaacgtgattgaaggccctctgatggccggcatgaaggttgtcgggcaactgttcggggacggcaaaatgttcctgccgcaggtggtgaaaagcgcccgcgtcatgaaacaggctgtagcctggctcaccccctatatagaagcggacagcaaaggagccgccaaggcgggaaaagccgtgatcgccaccgtgaagggggacgtgcatgacatcggcaaaaatatcgtcggcgtggtgttgggctgcaatggttttgaaatgattgacctgggcgtcatggtccattgcgataccattctggaccgggcggaagcggaacaggcggacctggtgatgctttccgggctgatcaccccttccctggaagagatgtcccatgtagccgcggagatggaacgccgggggatgaccattcccctgatggtggggggagctacgacgtcagccctgcatacggccctgaaaatagccccccattatcaaggagccgtggtgcatacggaggatgcctcccaggtggttcccgcagccgcctccctggtgggagaaaaaaaggattcctacattgccgccgtgaaggcccggcaggaggaattgcgcaacaatcatgaaaacaaacccgcccgggacctcctgcccctggagaaagccagggaattgcgctggaagggagcggaaggcggctatctcccccccgttcccgcccgtcttggcccggtttccatcggcagcctgcacagctccgtaagctgcggctgctgcagtgacgacccacgttattacgtaactgttcaggagcttatcgagcgcatggactggacgccttttttccacgcctgggagctgcacggcacatgggaccgcgcccgccgggagttccgcaccaaagacccgtccaaggctgaggcggccgcggcgctgtaccaggacgccctccgcctgctggaacaggccgtgaaggaaaaccgctaccaggcgcgcggcgtcataggcattttcccggccaattcaacagccagccatgacgacatcaccgtctgggctgatgaatccagaaccattcccctggctacgctgctgacgcagcgccagcaacaggacaaacaggggaaaccccggctggcgctgtcggacttcatcgctcccgaaggcgtcagggattacgtgggggccatggcggtcagcatccacggctcccgccgctgggcaaaggaatgggaagccagaaacgactcctaccgcgccctgctggtcagctctctggcggaccgcctggtggaggctttcgcggccatcgcccatgacaagctgcgccttttgtggaatattccggaaggggccggcgtgcgccccgcctgcgggtaccccagccagccggaccaccaggaaaaggaaaccgtcttcaccctgctccacgcccgggaggaagcgggcatgagcctgacggaaacatggatgatgcagcccgtttcttccgtctgcgccctcgtcttctcccatccggaaagcacttatttctccgtgggcgtcaccggggaagaccagcaggaggattacgcctccagaaagcgggcctcccggccctgacctcccctttcccttttatgcagcataccgaccagatacaggccctttcggaattcctgctggaatacgccaccaccctcatgggcgcgggggtgcataccaaccgcgccgtgcgcaacatttcccgcattgccgccgcgtacggatacagcgcagacatgaccattttccagcgcaatatcaccatgagcctgatctgcaaggatgacgagacgctgcgccgcacctccgtccggaaactgaaacccctggcgttcaacctgaacctgatccagcagctcagtgaattgagctggctcccggtggacaacaacgtcagcattgcggaaatggaacaggcattccgctccatggtgcgcaccaaaagattttcccgctggacggacctgctcctggtcagcgtaggcaacgccgccttctgccgcctgtttaacggagacctgtgggccatgctgaccgtgttcgccgccaccatgctgggctttctggccaagcagcagcttacccggttgaaatacaatccgctaggggtcatcatcctttccgccttcaccgcctccatggcggccgcgtgcgccgtccttttccagataggctccacgccgcagatcgccctggcagccagcgtcctgttcctggtgcccggcgtccagatgatcaactccatcatggacctgatgcacggccacatcctgatgggcatctcccgcggcatccattccatcatgatgattgcctgcatcgccatcggcctctccgcaaccatgctcatcgtaggggtaaacagcttatgaatccggatcttatttcctccatccttctggacgggctgatggccgccatcgccgccacgggatttgccgtcatctccaatccgcccaggcgcgccattgccgtttccgccgttctggcggccgtcggccacgctttccgcttttacatgctgcactcctggaccattgacatttccagcgccaccttcattgccgccttcaccataggcatgctgggcgtcatgacggccaagctagtgaagtgcccggcggaaatattcgctttcccttccctgcttcccatgattcccggcgtgtacgcctataagaccatcctggccctgatgcagtttatgcaggagaaccaggacgcggtcgtcatgaaccgtctgattgtggacatctgcaaaaacggcatcaccgccttcttcatcatcttttccctggtcatcggagtagccatacccctgctgatgttcaaacggttgagctatacacgcatcatcaagccggggcattgaccttcaaacaagggagacagggcatttttctcttgccagactgcgccccgtgtggtttactacgccccgcaacggcagaaacgcctgagcagacagccccatagtgtaattggtaacacacctgattttggttcagtatttctaggttcgagtcctggtggggctgccaatccaaccctccttcaaggagggttttttgttgccttttttcaggattcatcctctcccagagcaagcttgaacgccattcccccatcatccgcacagattcttgaaaatccagcaatcgtcctgccgcgcatggaacatgcgggggtggaggaaaatgccggaaagaagggtattccatgagcatcgcacacacggcatcccggaacggtaaaagctcttgcgttacagggatttttttgcataatcccccggcaggaatgacggaaaaacctatacaacttgggcttgccgggctgggaacggtcggttccggcgtttatgaaacgctgtgccgcaatcacgcccttctggaagcccggagcaagattcctttcaggctcaagcgcatcgccgtgcgcaacctggaaaagcccagggaaaccgtcgttccccgggaactgctgacggatgattggcaggatttggtaaacgacccggagatagacatcattattgagctgattggcggaacgcgccaggcttacgacctggtgacgctggccctccgtgccggcaagcccgtcgttacggggaacaaggctcttctggccgagtacggagcggagattttcaagctttccgcggaaatgggcacccccatttatttcgaagcgtccgccggcggcggcatccccattatccagagcttgcagaattccctgatttgcaaccacatcaattccattgtgggaattatcaacggaacgtccaactatattctctccgccatgggggaacacggggccgattacgcggacgccctggcccaggcccagaagctgggcttcgcggaagaagacccctccctggacgtcaacggctgggacgccgcccataaggcgctcatcctggcgatgctggcctacggaacaaccatttccccggataaaatttacgtcagaggcattgaaaatatcaccagccgggatttcagatttgccaaaaaactgggctataccatcaagctccttgtcgtcatccgctaccatgaggggcaggaagacgctctggaactgcgtgtccagccctgttttgtccatgactggcatatcctggcttccgtgaacggcgtgttcaacgccatttccgtcaacggggacattgtgggggaaacgctgttttacggccgcggagctggcaagaaccccaccgcttccgccgtcatcagcgacatcatcaccgccatgcgcgaaagccgctatccggaataccatacgggcttcaatccctatgccaaggcctgcgggatcatgcatatcaatgatacggtcactccgtattacgtccgcttccaggtagcggaccagccgggagtcattgcggaaatagcccgcattctggctaccttcggcatcggcatttccgccacctcttccgctcccagccatattgatgaaggcggagccccctggaacgacctcgttttcatcctccattcctgcccgtggggccagctccagaaggctctggaggaaataacccgcatttcctgcgtggcggcggagccccgcgtcctgcgcatagaacatcttcttcctcaatcctaacctacatatcatcctgttacatggctcttatcgttcaaaaattcgggggcagctccgtcggcaccattgaccgcatccgcaatgtagcgcgccgcatccatgaaaccaccagggaaggcaaccaggtggtcgccgtcgtttccgccatgagcggcgtgacggacaagctgatcgggcttgccagggaattgtctgaaacgccttgcgaacgtgaacttgacgtgctgatggccaccggcgaacagcagtccatcgccctgctctgcatggccctgcatgaactgggtgaaaaagccatgtcctttacgggggcgcaggccggaatcaccaccttcggcagccacacgcgggggcgcatccacagcattgacccgacgctgatgaacaagtacctgcaggaaggcaacatccttatctgcgccggctttcagggggttacggaagaaggaatggtccagacgctgggccgcggaggttccgacctctccgccatcgccatcgcggccgctctgaaagcggacgtgtgccagatttttacagatgtggacggcgtctatacctgtgacccccgcgtggtcaaagatgccaagaagatacaaaccctttcatatgacgagatgctggaaatggcttccaacgggtccaaggtgatgcagtcgcgttccgtggaattcgccaaaaaattcggtgtcgtctttgaagttcgcaactccatgaacaacaaccccggtacaatcgtgcaagaagaaaccccctccatggaagccgtcgtcatccgcagcatttccattgaccgcaaccaggcccgcgtcaccattaccggcattccggaccaaatcggctacacggcccagatactgggtgccctggcagaagcggaaatcaacctggatatgattctggccaatactgcccacgacggttatgtccgccagtcctttacgatgccctccaacgaactgggccgcgcccaggccgcccttaaaccggtcatggccgccctcggctccaccgtcaaggtggaaacggaagcggggctggccaagctttccctggtcggcatcggcatgcgttcccactcaggcgtgggagccaccgctttcaaggccctggcggatgccaacatcaagaccggcatgatttccacctcggaaatcaagattgccgtgatggtggacgaatccgatattgaggaagcggcccgggtagtacataaggcgttcaacctgggagcctgattttttcagtatttatcaactcgtttttccgcgccggttcacgttcccgtgaaccggctttttcatgcggcaaaaaaagcagccctttccaggaagaggaacgccatccccccgtttccttccaattttcgaatgaaggaagggcgtctctctccgcatgctgttgcgggcggaatggccgtctcaggaacacaggagaataatgccgccctttccctgttccggttttaccggcttgccgcctgcgtttttcagcgttcacataaaatccatacctctaggaacggaaattttccgcttctccatgcaggaaagggaagtccttacaggtacggagcaaaaaaggcacaacaaacaaaaggttcatccacaggggatcaaccgccccccgcaccgcgcagtggctgccgcagcccatcccttctattgcacccgtatcgtctgctcaatcagttcgttcaggcgcggcgcagtaatgccgccaaccatatccttcagcttcatcccttccagatacagaactgtcagagggacggcttccaggccatatttgcgagctatgtccggataggcatccgcatcaatcaacacggcaaacgccttgccgtcctgcgattcggcataagattttaccgcctggacgtaatccatggccgggcggctccacgaagcgtaaaaaacaaggagcactttgcggccggataattccgtaagctgccgcatgtcctcacccttgtaatccatccatacgggggcctttttcttaggttttgaaggagggaggacttttttgggagggtcaaacgtcctttccagagggcgcggagcgggctttttttccgcataacgggcgcgccgttcactggaatcgtcgcacccggtcaggccggccgccagcaaaccgcagaccaatatgaacaagccctgtttcatccgcaggcaagtatgcccggagaaggcgaatttgcaagcctgaaacccatcctgcttttcgcgttgcccctcccccttctttctgttatggtgaaggttgcatgaatggcgtccctccactggaattcgcaggggtttcccactgggcggccctggccgtcctcctggcggcgggagcctgcatcctggagctggggcagtcctacaaaaaaaccgtcagaaaccgcactaccttctggctgggggcggcctgcctgttcagcctggttcccgacctggccgccatgctggccgatgaaccggaaaagaactggacatggatgctccccctgcatttctgctccgtcatgcaggtggtgtgcgccctgagcctgtggataccctctcggcggctacgctccgtggcctattactgcgtgctgtgcgccaccctccaggggctggtgactccttccgtggcccatgatttcccctcatggacgtattttgcctttttcctttcccacggagtgacagtcatcacggcgctttacctgcctctggctctggaatggaagccggcgcgctgggacttcctgtgggcttttttgctggcgaatgcgtacctggtggccattcatcccgtcaacatgctcctgggaaccaattacgggtttaccgtggccactcccgccggagggtccgtgctggactttctcgggccatggccctggtacctgctgtggatgcaggttccggcgctggcgctgatgtatctgctcacgctccccttccgccgttatcccaggggccgcacgggcagttccctgttccgccattgaaagggaatcttttttccctgccccgccgcttccgacggaatccccgcaaaacggcccgcccgcttccggaaaaaaagagccccggaaagttctttattgtataatcggcttgaggatgccgatgtaggtgtccgatgtccctgttccgcgataaatggaattaatcctgattttaatggtgtgcacaggctgcctgtaatacggaggcacgacaatctgcggagtccagtcatcccgcagcgtggcgtcaaaagtataagttccgttcagcgtcacctgaatgcctttggggcggctgaacatggagtaggcaatattcgggtgcctccgggcttccgaatccttttccgggtcggtcaccggggaaatgccggtctccagcatgattcccagcagcaagccgggtttcctgagcctgatctccagggtttccccctggccgtccccggaaacgctttccgcccaatagccggaactttttttcagattgtccggggaacatggaaccccgtaggggtccctgtccagggtggagctggcagtcacgtcatactggtccgtcaggacgcccctttctccgcggacggtcatccgcccatccttgtccagcacccacccgggccccggagtaagcaccaaggagggagcgtagggcctgccgtccgctcccagcagagaccaagtataaacgcctttgggcgtcgtcacgatggatttggcatccgcggagggatccagcttgacggactggttggtcatctccgagctgtacacattgaccaccgccctgggggtgccccctgtccaggtcattaccggagaggtaagcagcgtcaggcgcggttcccccatgtggaccttcggttccggcgtaatggcaacgtcctgcgtataaggaacggagaactggaaggtaagaacatggattcccgccttgttgggaacctgggccaccagccagtgagttatgcaagcaatgggaaacatggagggagcgtccgcctggagatgccgcccctccaccagggaaaaatcacatttcagatcatccacggatgtgacgacgtcctgcaccgctttcgtaaaagggaggctgcgtatgggttcctgcctggcggcattggcctgttcatcaggcggttcgtactggaacggcacgcctacggaaatggttttccccctgattcccctgggaatatccagcgcgcaggtgtaaatgaggaaagcctggtgctgcttcagggaaacagtaacgtccagcgcgttcagccggattccgtccgcctgcgtcaaatccatgggaacgggcaagccgggaaccggagcgatgcattgaaaggatatctcctgctggcgggggcggtccgctttttccgcggcggtctgttccttctgctggggttcggcggccatgcccggcacgcagcatgcaatgccggccagccagatcagggtagccaatctcatggccgttagattaacgcgtggcagcccgttcatcaagtccatttaggggagggggaaaggtcccttcgtacccgcccttttccctgaacaaacaagggcggcccgcctttgaaccagcgacgcccgcagcaggaaaacattcgttccaaactccggaattggtcgcttcatgcccttggaagcgggttccggggttccgcctggacgtctctctgccggagaagcggaaagatggcccatggcacatgacaggtaaaaaccaactgaggggcatcggagggccttttccgccacaaaccagcataattaactcattaacaacaatcggcatccattgttgcatatttgcagaaagaccgtgttcttccgctttccaggcgccgttaacgtactcttattaccagggtttttcatgaaaagcccgtttccgggggagagccaaaacgcccagccgcccccccttcgccaaacaaaaaagaagcatgcggaagacagaaaaaatcacgcaagacaggagaattttttctagaaaacagaacaaataatacaatatatagtgtatataaaaaaatactgtacaatatttccttttcattaggattatttttcagtagataatgcacacgctacgcgccgccgccccatgacgaagcgcaaaagcctacgggattattcccaaacctttctacttcgcaatccaatgatcacagacaactcgcaaaccatactcaaactgcgtacaggccaggaaatcatcctcccccagaggaaagacctgctgggcggtttgaaattcaccagaaggttttcacacaatgaagtccacccctatgatgaagtggactggacacgccgcgacgtccgcattatggattggaaaaccggcaagaccatttacgagcgcctgggtctggaagctccggcccactgggatgacaacgccgtcaaaatcacggcggacaagtaccttttcggcagtgaacccggctccctggaatatgaagacagcttccgcaatatctacgaccgcatttccaatacctataccgtatggggatgggaggaaggctacttcgccacgctggaggacgcagaaattttcaatgaggaaatcaaggccatgctggtgcagcagatatgggcgcccaactcccccgtctggttcaacatcggccactgggagcagtggcgctggggacgcccggacctgagggaaaactatacaggccacggcaacaaggcctaccataccaaagggaccaagaacaatctgaaaaccttcatggtccagtctacgtatgaatacccccagtgttccgcctgcttcctgacggaagtgggagacagcatggaggatattctggaccacctgacgacggaaggccgtattttcgcgtccggttccggagtaggcatcaacctgtccaccctccggtcctctaaggagcccatcagcggcaagggccgctcctccggccccatctctttcgaccgcggctgggaccgcatggccggagccatcaaatccggaggcaaggcgcgccgcgccgcacgcatggtcctgatgttcagcgaccacccggatattttcagattcatcaatacgaaaaaccgccaggaagacatcgccaaggttatcctgcgcgaacacaacgtgcatgtggagctcaagcagattgcggagaccaagctggttgccggcactccggcggaaaaggccgccgcccgcgtcattctttcccttcccctggccacccggaacagttttgacccgcacatggacgccctgctgtacggggaaacgctttcccaccagaacgcgaaccattccgtttccctgaagggggatttctggcaggcgctcgccaataacggcaatacctacacgcgctgggtcacgaatccggcccacatcgaacagacgttccgcgcccaggaacttctggaagccatggcccagtccatctgggacaacggggaacccggcgtgcacaataacgacgtgatcaacctgtggaatcccgtcaaatccatcggcaccatcactacgtccaatccctgctcggaatacgtcttcctgaacaatacgagctgcaacctttcctccttcaacgcctatcgcttcctgatcaagggagaggacggtaagcccgtttttgatgcggacgccctgacccacgccgcccgcctggccatggtctgcgcggacctgaatgtggaacgcggcggcttcccgattgaagaaatcgcggagggcacctacaagtaccgcaccacgggcatcggcttcgccaacgtgggcggctccctgatggccctgggcgtgccttacgattccgacgaaggccgctggattgcctcccagctttgcagcgccctgacggcggcctgctggacggcctccgcggaaatgggcgcggaactgggttcctacgtggaataccccgccagcaagaaagacctgctcgccgtgctgcgcctgcacaacgcagcccagaaactggcaagcgccctgccctcccagaaggactccaagacgctggacgacctgattgagaacatcatcgccaatgccggagggatcctgccggaatcgcaggggctcaccgcctcctatgccctgcatgcctaccttaagagcttcaaggcccccaccatgatgaacagggagcgcatcgcccctgcggccaagctggcggaagccgcttccgacatgtgggcgaaggtgatcaaggccacggcgcaccgcaacgcgtttgtttccgtgatggcacccacgggcaccatttccgcccctctgggctgctatgatgaaggcactacttccattgagccggattacacgctggtgaaatggaagcagctggcgggcggaggctccctgaagatgttcaaccgcctggccctggaaggcctccgctccctgggttacccggaagacttcgtcaatgaagccgctctggaagtggcgggcttggacggcctgatttccgcgttccaggggaatatggattacgtcgtgaaccagctcattgtggacccctgcaatgaccaggccggccccgtgcgcctcgcgtggcgccgcctgctctccggaacggaatcccgcagtgaaattcaggaaaaagtggcttatatcagcaacccggccaacatggccgtgctgacggcggatgaactcgccgtagtcaacggagccgcccatattgaatccataccgtggctgaataagaaggacctgccggtctttgactgtgccgccaccaacggcaacggcatccgtgccatttccccctgcggccatgtgctgatgctgggcgccctccagcccttcatctccggcgcgtgctccaagacggttaacatgcccgtctccgccagcgtgcaggatatttacgattccctcatcatgtcccacgagctgggcgtgaagtgcatcgccatcttccgcgccggctccaaggcgaatgccgtttacgtggtggataccccggaaacgcgcatgttcaaggccaaccatgtctgggaacagctggtgaatgccggatcggacgccattgacgaaatcatcgcggaggcatccaagccgcgccagcgcaagctgcccggccgccgtctgggccagaccgtaaaattctccgtaggcggccagctgacgggctacctgacggtaggcgtttatgcggacggcacctgcggggaagttttcggacgcctgggacaagtcggctccttcgcctccggcatgtttgaagcttactgcaaactcctttccaccgcccttcagttcggcgtgcctctcaaggaagtggtcaagggtttccgcaattactccttcgagccctccgggttctgccgcgtgggggacgacacggaggcggacacctgcacggaaatccgctcctgcgcttccgtggtggatttgattgccaagatcctggcgtggcttttcccggaaagcaacggctaccgcctgcgggacgtattctccatccccagcgtcagccttccgggccaggctccggatacgacggtaagcgtgctgcccccccgcatcatcaccgctccggcgcatcccgctactccggccctgccggaaattcccgccggaaaggttccggaaggaacgatgctcaacggcgcctccctctgcccgcagtgccactccctggcctatgtccaggacggcaaatgcaaatcctgccgctcctgcggatacaaggacggcggctgcggggaataaacggtaaccagatcattccatacccgctctttccaggcggaacccggcagctgccgggttccgcctggtgaatttacggagaaggcattctttccgggagagacggttttccggccccctcccggcatgaactttccggaaagaagcgaacggaaaccgcccgcgcgggaaaaggaatgataggcgtttgccttgaaatccggcagcatttcattcatagtccggcgcgtacgcctgaagccgttcccacattttccatgaaaccctactataccctggccgatcttctggatgaagaacatccgtttgatgccggggaaaccgttcccgccagactggccgtaatcggttttcccattgcccattccaaatcccccgccatgcagcaggccgcgctggatgcggcgggcattcgcgcccggtatatccgcatccaggccgctccggaagaattcggggaggtggtgcggctcctcaggaaaaggggattcacgggggccaacgttacggttccccacaagcaggcggcctgttccctgtgcagtgacacagacgccctttcccgcgctaccggttccgtcaatactcttgttttccaacaggacggttctgtctccggattcaatacggacggcccggggttcgcccgcgccatccgggaggaattttccgtggatttgtgcgatttgaaagtggctcttctgggctcctgcggcggggccgggcttgccctggcctacacctgcgccatgcagcgctgcgaacggctgacgctggccggaagatcggaagaaaagcttcaggagcttaaaaacagactgagttcctttttcattgacgaacacaggctggaagaggcctccgaccgcctggcggcccaccagaacaatacgccccgtttcaatgccgccgtggaggaagcggacctgatcgtcaacgccacctccctcggcctgaagcccacggacccttcccccgtcccccctgcactgctttccgcccaccatctggtttatgatttacagacgcatgacgatgccttccagatggaagcccgctttcagggcgccagagtttccaacggcctttccatgctggttcaccagggggccctttcctttgaacgctggttcggcatcaagccggatatttccgccatgcgccaggctcttgaacaaaagcatgactgacggcaccccccattttaacatccatgctttccggaatgcgctggtagaatggttcaggcgcgaagggagggattacccgtggcggcggacaacggatccgtggcacatccttgtttccgagctgatgctgcagcagactaccattcccaccgttttgggaagatatgacagatggatgcgccagttccccactccggcgcatctggctgccgtggacgaacagacggccctgcgctcctgggaagggttgggctattaccgccgcgtgcgttccctccaggccatcgccagggaaatcgtcaacagattcggagggcggttcccggacaatgcggaagggctaaaacgcctgccgggcatcggcccctacacgtcgggagcgctcctctccttcgccttcaacaaggcggctcccatcgtagacgccaatgtcgagcgcgtcctggcccgcattgacaattattccgttcccgtggattccacggaaggccagaaatacctgtggagccgcgcggaaagcctggtggatccggaacatgcccgtgaattcaattcagccatcatggaactggggcaaacctgctgcagcatcagttctccggactgcctgctgtgccccgtgcgccctttctgctctgcggaacggccggaaacgcttcccgtcaaaaatcccaagcctcaagtcacccgggtggaacaccacgatattctttacatccgcggcaaatccgtcctgctggccaaatgcccggaaggcaagcgccatgccggcatgtaccgcttcccccagagggaggacgagcacaccctttccctgccccatgtcctgaaacaaacctacagcattacccgctacagggtgacccgctacatccaccatgtgacggatacgcctctcctcagggaaggagaggaattcgtgccgttggacaaaatccacgggctgcccatggcctcaccggatcgcaaggcactgaactcccccgccctcggcaaactgctggaccacatcagatgaatgacagattgacgccggaacttgtcctctccgcctattgccaggggtgttttcccatggcggacccggaaacgggagaaatctccttttacgaaccggacccgcgcgccctgattccgctggacgaccgcttccacatcccccacggcctcaaacgggctttgaataaaaaaccctttgaactccggatggataccgcttttccggaggtggtccatgcctgcgcccggacggaccagccggaagaacaatggatagacggacagattgaagaagcatacggcaagcttcacgagatgggcttcgcccacagtgtggaatgctgggacgaggaagggctgcagggaggcctgtacggagtagccctggggaaggcttttttcggggaaagcatgttccaccggaaaacggacgccagcaagatcgccctggtggccctggtgcaatacctgcgggcgcatcggttcctttttctggatacccagtggacaacgccgcatctgctgaaattcggaacctatgaagtgcaggccagggaataccggaagcttctgaagagggcgctggaggaacaataaactatattttactgtccggtgtaaacggtcatgagattgattcccaattatggtagatccggcagcgcaccggatttcataacctgttgatgatttttcttcgggctttgccatcaatacttgccccccatgccaccccttacgaccaaacgttcaggaagcatggctccggcataaaaaactccggaatcgacatcaacggcactccgggaaagactgcggagcattttgggaaagatgcacttcctcttccgccaggagagcttcggcccatgatgccattaacatgattttttgcagcaaggcggaagccctcaaatatgcccaaaccaaacgcatggagcagtttggcccgcaaggttcaagccatatctgacaagaccgatccttccgctaaaaaatcccgtggttccgaagaaccacgggcttgtgtattaacccttaacaaaaaggtttattcctgttccagagcagcctgggccgcggccagacgggcggtcggaacgcggtagggcgagcagctcacataagtcaggcccagcgtgttgcagaacttgacggaagcggggtcgccgccgtgttcgccgcagatgcccagcttgatgtccgggcgggtggagcggccgagttccacggcaatcttcatcagcttgccgacgccgttctggtcaatggaagcgaagacgttcttcttgatgatttccagttcctggtactgcggcaggaaggagccggagtcgtcgcggctcatgcccaggcccgtctgggtcaggtcattggtgccgaaggagaagaactgggcggtttccgcgatttcgtcagccgtgacgacagcgcgcgggatttcaatcatggtgccgacgaggtagtccactttgacgcctttttcctcaaatacctgctgggccaccttgtcaatgatggctttctggatgtccagttccttcttgaaggccaccaggggaaccatgatttcaggaaccacggcaaaaccttcttcctgggagacttccacagcggcttcaaagatggcgcgggcctgcatttccgtgatttccggataggcgatgccgagacggcagccgcggtggccgagcatcgggttgaactcatggagttcggacacgcggcgcatgatgacttccacaggcatgccgattttctgggccaggtcaagctgctgttccttcgtctggggaaggaattcgtgcaggggcgggtccagaaggcggatggtgcccggcaggcccttgagcgccttgaagatgcccttgaagtcccccttctggtaggggaggagcttggaaacggcggctacgcggtcgctcttcttggtggagaggatcatttcacggacgaagtcgatccggtccccttcaaagaacatgtgttccgtgcggcagaggccgatgccagtggcgccgaaggcgatggcggtttccgtctgcttgggagagtccgcattggtgcgcactttcattttggtgcagtcgtcgcaccactgcatgagcttggcgaagttctggtaggtgcggctgtcttccggcttcatggtcttggaaatcaggacctggatgatttcagagggggaagtttccaccttgcaggcgtataccaggccgctcgttccgtcaatggagaggtagtcaccttcgctgatggttacgtcgccaacggaaacggtgcggttgttgtagtccacaatgatttcatccgcgccgcaaacgcagactttgcccatctggcgggcaacgagggcggcatgggaggaaacgccgccgcgggcggtcaggatgccttcagcggcaatcatgccgcgcaggtcttccggagaggtttccagacggaccagcagaaccttttcacctctatccgcagcttccacacagcgttccgcgttcaggtagatgcgtccggtggcggcaccgggcccggcgggaagaccgcgggtcagaaccttggcactcttgatggcttcacggtcaaagatgggggtcagcagctggtccacctggtccgcaggaatgcggcgcacggcggttttccagtcaatcaggccctgttccaccatttcacaggcaatgcggaaagcggccacgccggtgcgctttccgttgcgggtctggagcatgtaaacggtgcggtcctgaatggtgaattcaaagtcctgcatgtcatggaagtggttttccagtacttcgcgaatgcgcaccagttcattgaaggcggcgggcatcacttcatgaagggcagcaacgggggcgggcgtacgcacgctggccacgacgtcttcaccctgggcgttcatcaggaattcgccatagaattcgttttcgccggaggcggggttgcgggtgaacgccacgccggaaccggattcctcacccgtgttgccgaagaccatggcctgcacgttgacggcggttccccattcggacggaatgccgtatttctggcggtacacgatggcgcggtcattgttccaggaaccgaacacggcgccaatggctccctgaagctgttcccaggggcattccgggaattcatggccggtgcgttccagcaccagggccttgaagcgggagacaagttccttcaggtcatcggcggagagcttggtgtcttccacgtcctcgctgccgaagcgttctttcttgatggcggcgatggcggtttcaaaaggttcgtggtcttcatccggggttttctgcacacccagcaccacgtcgccgtacatctgcacgaagcggcggtagcagtcccaggcgaagcgggggttgttcgtagccttcaccatggcttccacggatttttcattcaggccaaggttcaaaatcgtgtccatcatgccgggcatggattcacgggcgccggaacgcacggccaccagcaggggcatagcttccgtatcgccgaacttgcgtcccaggatctgttccattttggcaatgccttccttgacctgcgcgtcaagctgggcgggataagtgcagccgtgatcgtagtagtaagtgcaaacctccgtagtgatggtgaatccgggagggacaggaaggcctatgcgggccatttccgcaaggttggcgcccttgccgcccaaaagatttttcatgctgccattgccgtcggcggaccctccgccgaaagaatagacgaatttgtcagtagatgcgctgcacgcgcaggaattggtggacatatcgattattgtagtcgaattaatgattctgcccaaacatcgaccaaaggagccaacaaaagacccaatagcgagttagggtcgaataaggatgccttcggctccttgctttgtcaattcgaaattgtacggaaaacaaaaatatttttcagagtttttggggaaaagaatgcatgccaaaaccctgcttttccagcctgtcccgttcggaaccgctcttcctccgggcaacgccgcttcctgttttccggcggccccgaaattacctgggaagaaaagcgcagcgagtttcttttcatggctgtccggaaaaggaaaacggacgcttatcaaccggataaacgtccgccggaaataatatgccctgttttttatgccttgcagaaggtatcttcgtccgcacagtcagcctgaacccacttgacggaggaatcaccggaagctatatgcacgaggcaatggtacacggcttcctggtccgcatccagccgggcagccatctgggcggcggtttccggggcggttcccagagccccccttaccctgcccagcagggccaggaaggaacccgccgcttttttgccggcttccacgccgggctggtggtaggcgttgatgttgaccagggaagcatagaaggagacggcgcgctcaaacagggcaatcagcatgccaagcgttttggcgttcacctccgggatggaaatggtgatggaggaacggccggattccgccagagcctggcgggtgccgcgcaggaagccctggaggaagtctccgcaggtagcgcccgcttccacttccaccgcatccgcggaacattcgcgcacttcaatgaaggtggcgaagaagttgttcacgccgtcacggagctgctgcacataggcatgctggtccgtggagcccttgttgccgtacacggaaatgccctggcagacttcgttgccctccaggtccagccgcttgccgagggattccataatgagctgctgtaggtatttggagaagagcaccagggcatccttataagggagaaccaccatatccttttcccccttgccgccggtggccttgtaccaggccagcgccagtttcatggaggcgttgcatttcacgcagtcccggcgggtcttttcgtccatcaggcgcgcgccttccagcaggtcatccacgttcacgccctgaagcacggcgggaaccagccctaccacggacatgacggaggtgcggccgcccacccagtcttccatcgggaaacgcctgagccagccttccgcctcagccgttttgtccagccgggaatccgttcccgtgacggcgaccgcctggggtgcgaattccagcccgttcttcctgaagaagtcctgggccaccagcatgccgttgcgggtttccggcgtgccgccggatttggaaatgacaatgacaagcgtttcttccagagggagggattccagcacccggtacatgccgtccggatccgtgttgtccagaaagaacatgtccagccctgccgccggaatggcatccgccaccagctccgggccaagagcggaaccgccgatgccgatgacgagggcggcggaatattgttccgcgcggggaggcgttattttgccgtccagaacgtcccgtccgaaggctttgacgtccgccagggggccgtcaatggcggctttcaactccggcgtgggagccagggaggagttgcgcagccagtagtgccccaccatgcgtttttcatccggattggcgatggcgccggattccagcgccttcatgccggcaaacgccctgtctatccgtccctgcatggaagacaggaacgcgtcgtccagcggaagttttgaaaaatcaagggaaatgcccagttcagggtagcgaacgagttgttgtgcgtataagctcatgatggtcatggattggaaaaagggttaccggagttttttcaggatgcttttggcctgcacgtcgccctggtccgccgctttctggaaccattcccgggctttggccatgtccttgggcaggccgaaaccggtctgatacatcacgcccaggttgtattgctccgaggcatagccttccgcagccgcccggcggcgcgtgcgggactgttccctggcttccgcggcggtaaggcccagaacccgcgccgcgtccggccacgcggctccgaatctggaagcggaaggggcatagtaagcggctccggccttgcggtgcatttcctccgcttttttcttatccctcttcacgccgtatttgccctggtcatacaggaacgccatgccccagtagccacgggggcagcccagctccgccgcctgctggaagcattcaaaggcatctttatattttttggaacccatggcgcgcacggcgtcggaaatatggagttccgcctccttcaagcctgggaattccggaatagccgcccattcccttttcagttcctccctgtcccttttggacttgggaggcatgccggacggaccggaaaaacggaaaagggggaagtagccctccatggctcccatgttgcccagtccggacatcagaaaaacgccgggagagaccttccacatgtgcatgtactggatgcggccttcctgaagggattccctggccacccactccggcatgttcgccggttccccgaattgttccgtcaggcccaccagaagagccttataggcggatttcagcctggtctcatattcggaaccgcggtatttgctccgggagtagaggacaacggccctcaaaccgccggagggatcatggtcaaagttcagggaaaaagtctggccgcctatggcctgcctggttttgaatacgccgttaagtccggtgcgtgaaaggagggcgtccgtgggcggcccttcaagcttcttgctccgcctcagggttttcagcacctggtccttgtccatccccacctccagtccctcataaagggcggcaagcaaaggggaacatgtgagagcgaagagtccagcaacataggctagttttttcatagaaaaagcaattgggcggttttctaccagaccggaagagttttcaaaaggataaaatgcgtcagcgatggagaggaaaatttttcataaaatattcatttccagtctacccacagtcttttcaaataatcctccccggagaaatccgggggcatggggtcatgggtcaggcggaaaccgggaacggcacgggccaccatcctgcggaagtcttcgtggcccagcttgcggcagttgctggtacacagcatccagccgcccggctccaggcattcgcgagccagggccaccagctccccgtagtgggattccacccggaacaccttcccgcggtcatcccgggaaaacgtgggagggtccagaataatgccgtgaaaggtacggccctgcctggcgaaccgttccagccagcggcgcgcgtcccccttgcagaaatactgggcggaggggtcaatgccgttcagcatgaaattttccctggcccagtccaggcacggctgcgccagatccagcgtggttgtctgcgctccgcccagggccgcataaacggaaaaggctcccgtataggcaaaggtattcagcaccctcatgcccggagcgcttttttccctcacccggcggcggtgatcgcgctggtccaggaaaattccctgggaataaccggcggacatgtctattttaaaacgcactccctgctccaaggccgtaaattgcaggggaaggagcggcccggagatctggacgggcgcttctttctggttttgttccagttttttgtggaatacgggcatgcccgtatcccggagttcgctttccaggtcctcaggaatggaacagccgcgcgtggagatgagaatacgatccgccatctgatccacaaagacaccggggattccatcccctgccccgtccatgacccggaacatatccgtatccggcggaatcaattccctgttgcgttctacgcaataatgataatttctctccacggcgggacaaagagtaacggatgaagaacgttcccgcaatgtcaaagaagcaggagcctcatttcctccggagcaagagttccgccagggaaaaacggtcatccggacagcccagttttcttaaaccggatgattacaaaaaattgtctgcaagataaattttgcaggcaacaacatttttaactgccggaaaagaggttctcaagctcttcggcggcgaaccatcagggccgccagccccagcaggttcagggatgccgcagccggttctggtacagaaacagtcttggcaggagcttccggaagcagagaactgttaaaatcaaacaatacagcagcagcactcgcggaaagagcggatatcacatccaacatggaaatagagactatttttcttataaatagcaggtaaacagcaacttattgcagtcaatccgctcacaaaaaaagaggccggatttttcatccggcctctcgcaacaggtatttacctgataaacaggaaattccgtttagtcagcgtactgttcgttaagagcttccatgatttccctggaagcttccggaatgttggtgcccgggccgaaaatggccacagctccgtgttccttcaggaagtcatagtcctgggcgggaataacgccgccgcagaagaccaggatatccggacggccctgcttggcaagttcctccaccagggcaggaaggagaaccttatgaccggcggccagagagctcatgccaatcatgtgcacgtcgttttcaatcgccattttggcagtttcctccggcgtctggaagagcgggcccacgtccacgtcaaagccgaggtcggcataggcggaggagaccaccttggcgccgcggtcatggccgtcctggcccattttggcgacgaggatgcggggacgacgccccgtgcgttcggcgaagtcatccgtcatcttgcggacttcctccaccagcggatcttgaccataggattgagcgtacacgccggtaatgagtttgattggtgctttatgacgcccgaagtgtttttccagggcggaggagatttcacccagggaggcgcgggccttggccgccttgatggcaaggtcaaggagattgccttcccccgtgcgggcgcattcggacagggcttccagcgcggcttcgcacgcggcggagtcccgttccgcgcgcagtttctgcaggcgggcgatctgggcttcccggacggtggtgttgtccacttccagaatatcgatctgggcttcctgttccaggcggtatttgttaacgccgatgatgggttcctttccggagtcaatggcggcctggcggcgcgctgcggcttcttcaatgcgcatcttgggcagcccggtttcaatggccttggccatgcctccgagtttttccacttcctgaaggtgggcccagcccttgcgaatgagctcattggtcaggtattccacatagtaggaaccgccccacgggtcgattaccttgcagatggtggtttcatcctgaagatgaagctgggtgttgcgggcgatgcgggcggagaagtccgtcggcagggcaatcgcttcgtccagagagttcgtgtgcagggactgcgtatggccgcaggcggcggccagggcctcaatgcaggtgcgggtgacgttgttgaacgggtcctgttccgtgagggaccagccggaagtctgggagtgcgtgcgcaaggccagggacttcgggttcttgggattgaactgcttgatgagtttggcccacagcacgcgggcggcgcgcattttggccacttccatgaagtaattcttgccctgggcccagaagaaggaaagacgcggcgcgaaggcgtcaatgtcaatgcccgccttgatcccggtgcggacatattccaggccgtccgcaagggtgtaggccatttccaggtccgccgtcgcgccggcctcctgcatgtggtagccggagatggaaatggagttgaacttgggcatgtacttggaggtgaactcaaagatgtccgcaataatcctcatggagggatcaggcgggtaaatgtaggtgttgcgcaccatgtattccttgagaatgtcattctggatcgtgccggagagctggtccagcgtgcagccctgttcctgggcggcgacgatgtagaaggccagcacgggcagcacggcgccgttcatggtcatggagacggacattttgtccaggggaatgcccttgaagaggatttccatgtccaggatggagtccacggccacgccggccttgcccacgtcacccaccacgcgggggtggtcggagtcatagccgcggtgcgtcgccaggtcaaaggcaatggaaaggcccttctggcccgccgccaggttgcggcggtagaaggcattggattcctcagccgtggagaagccggcgtactggcgcaccgtccaggggcgcgccacatacatggtggcatacggtccgcggaggttgggagccacaccggccgtaaagtccaggtgcaggcagtcgtcgtacacgctttccgagtaggtgggcggcacgggaatttgttcattggtcatccaggtttccgtttcggaagccggggacggggcaccagccttgatttcaggataggaggcggatgcaaagtcaggaatattgctcattgggtggaataggttggtggttgttagaggccgattttgttttgaatggcttcaacggtgttgtagcagttggccttgacgtggatgaagatgtccacgccggcttccttgaatgcttccacatagtcggccggataaccggcaagggccaccatcatgtccggtctggtctccctgagagccttgcagaaggcggggacgatttccggataagtgtcatccgtggagcagatgacgcacacggcgcagccgctttccgcagccgccctggccgcgtcttccggagtttggaagccggccggataaaccacatccagaccgccggcgcgcaggaagtcacgggagaagtccgcgcgggccttgtgctggcggagcggccccatgttggcgaagaagaccatcgggcgggaacccttttctgccacccaggcgtcagccttggcgagcagggattcaaaacgttccgccaggcggcgcttcggcagggcttccatttccaggggctcgccgcacttgcagtcagcgctagccaccagggccttgttgatgaggcaggtggaaaagccttcttcggcagccttgcaggcggagtccacgctcatttccacgaccgggagctgaatatccgcattcttgcagcagccgtggcccttgtgggcggaacagcaggagccttccggagcttccagctttttctccgccaggttgacatactggttgacgcccacgatggactgccggcgctggtccgccagctcgtaacgcctggcggcggtggcgttcaccttcttctggatgctgctggctttgagggccttgacgatgccgccttccttttcgatgccctggaagaattcccatatcttccgggaggcttcatccgtcaggttttccaggtaccaggaaccgccggcggggtcaacgaccttgtccagattgcattcgcccagcagaatcagcgggcagttgcgggcaatgcggcgagagaattcgtccggcatgcgcacggcaacgtcaaagggaagaacgtcaatactgtccacgccgcccatgatggcggagaacgcctgggcggagccacgcagcaggttgacccagggatccaccttggagagggtccagaaggaggtgcgggcatggagcttgattttggcagcttcctcgctgccgccgcattcttttacgatgatggcccaaagttggcgcagagcgcggattttggcgatttccaggaacaggttggcgccgatggaaaccgtaaagcgcatgtgcgccgcagtttcatccacggagaggccgcgttcctccatggcgcgcaggtaggccacggcagtagacagcatggcgcccacttcctcaaaggcggaagcgccggagtccgcgtagggcagcccgctgacgccgatggtctggaagccgggagcgttggcaacggcccatttggtcatcacggccatctggtcatagtaggcgcagatgcccttccccccgcaaagggagcccttcatcacggctttccccaccgggtcatacagaacgccgcccttgaggtccgccgtcttgacgccggcggccttgcaggtgttcaggaacatggagagggttcccaagccgcaggaaccgggagtgacatatacgggaagcccgtccagccggacgcccctgagggccgcatcccagtcagcctgcttgcgcagcttcaggccgcatttgcagttgagctggacgtttacggcggtcaggccgcggtccaggtcatgcagaagcttggcgttgaagtcttccggagaggaagcgggaatgctctgggcgatttcgcagggcttttccatatagcccagggcgcgcgttccgcggcggtacggaaattgcccggcaggcattaccggggaatgttcatcccatttgttataaatgggatgcagggtaattccctccacaagcttggtaaaaagcttcttgtcaaaatcagcccctttcagggcagcgactgctgcctcgcgccattcggcgtatgtggctggtgcgaattctccgaaatcaatttccggagccgttgttttatttccctgttgcatggcgaagtcaatgggtaaggcctaatatgttggtttttaactatgcgcaaaccaggccaagtttaaagcgcaacattattttaggaaatcaaagtgtaaagtccagcgagaaaaatactcccgtccgtccgcaaatgcgaatttgcttcatcacgcgaggcaaacttgcaaaaacgatatccatggcgtaaatacgggaataagcatgcccccttctactaccgtcaaactccctccccagctggtccggcagctccgaactttccggcgccgcctcagaacggtgaagatgctggaagccgtatgccttgcaggcattgccgtcattctttcctacgcgctcctgtacctttccgacagattgtgggagacgccccccgccgtcggctggctcctgtttttcatcgccgtgtccggcctggcggtgtttattccctggtggagtttccggtgggtgtggcagaggcgcacggaatcccagctggcgcggctgatttcccggacggacgcggccctgggggatcgtctcctgggcgtcatcgaactggattccgaaaagcacggccgccaatacggttccgaaaagctgaaagaggcggccatggagcaggtggcccgcgaagtgtccgcccgggacctgacggcgaacatcccccgacccagccacagaaagctgttcgtcctgctggcggttctcgccgcatgcacggcggccgtatgtgcggtaagcccggaagcggcagggaatgccctgaaacgctgggtccgcccgttcaatcctccggaacgctatacgttcacccagctggcccccaccccggattccctggtcattcccctgggagagagctgcctgtatgagatccggctggcggagggaaccaaaacccgcccgcagacggcagagtattttttccgcaacagggtgagccagcaggcgcctcttgcggacggcacatacaagatccacatcccccccatgcaacaggcggacaacctggagttttttgcaggggatgccgtgcgacggctgaacatcatcccgaaggggcgcccttccctgctgggagccgaagccagcgtggcctatcctgcctatatggcgcgcgccaacggcagggaagccatgagagcaggagttatttccgccccggaaggctctacgctgacgttgaaggtgtccgcctcccagcgcctgcagtctgcggaggatgcacagggccagccgctccgggtggacggaagcagcgtcatcattccgaacatccttttggagaaagagcccagggaaatagagcttgactggatggacagcgacgggctggctgcttcccggcccgtgaagatacgactggaacccattgaagacaaacagccttcaatttacctgagaggcggcgaaaacgaccgctacgtgctggaggataccagcattgaactggaggtagaggcggcggacgatttcggcctccgggaaatgggggtggaatggcagggtgaaaaatccttttacgacggcaatgaggatgaaaacggggcctcagctccaaaaccggccggtgcggacaaaccggcgcccggcctccgcggggagaaagtgctggcggacggacagcccacgcagaccgggctgaaaggaacattcctgttccaggccagggcgctgaagttatctccccagcgcgtcgtcatccgcgggtttacgcaggattacaaaccgggaggcaggcgcgtttattcggaacccatgattattttcgtcctttccaagtccgagcacgcccagatgatccgcaatgaactggaacgcatcaccagcgagctggaaggcatgatccgccgcatggacgccatggcggacgaggcaaaacggctgaaaggaatggaaagcggcaaattgaaagatgcggagtcccaggaacgcctgcacgccctggccgatgaagagcaggccaacaggcgcgagttgggagacttgctcaaccgctcggaaagcctgtttaaggaagcctcccgcaattcccagatagacccggccggcatgaaggaattcatgaaaggaatttccatgctcaaacccattcccgacggacccatgaaaatggcccagaaacagttccgggattccgcctccgagagccgctccgagcaggaaagcaggaaggacctgaacgacggggagaattcccattccgaagccacacaggcgctgaaagacaccatgaaccagctctccaagtccgcgcaggacatggaggccagcacattcgtggcacggctcaggcaggccgcatccaaggaggattccatcgcccatgcactggtaagccagatcaacaccattgcgggcatgaccatggaggagcttgacccttccaccaggcgtgaaatggaaaccatcgccacccttcaaaacgcctccacgcaggacataggctggattctggaagacctcagctattacaagtcacgcaccggggagcgcatttacagcgacctgtacaaccagatgaacgctttctccctccgggataagctggacctggtgcacggcaatatcctgaacgcaatcacggcccgctccattgacgagtcccgcctgtatgcctccaccctgcgccattgggccaaattgatagacgactataagaagagccgccgcggcggcgggggaggaggcggcggcgggggaggcagccagtcctccatttccgacgccgagtttgaattcatgctgaaactcatccgcatgatccaacaggaacaggatatccgcatgcgcacccgcgccgccgaacaggaacaccgcaaaaaatttaccccacctgccccatgaataccgccaatttcccagccatgattctggcactttccctgccctgcgccgccgctccggcccctgctccggaatattccgccaagcacaaggaaacggcatccaaactggcagtacaacaggacgagctccaggcggacacttccgaccttatcctgggagaaaccaatgaggaagtagtggaactgctgaaaaaatgccgccatgccatgaatgacgccgtggacctgctggaagtttacaataccggaggccagacgctggccgcgcagtcggatgtgattgaattgatttaccaggcagccaaggccaagatgaccggggccgacggccagcccaagccgggaggaagagctcttatggacatgctgcgccaactgcttggcatggatcatgacgcccagtccgcagaacagcaggaaggggatgaaaaagggcaggaaggttcccagaaaggcagcggcaacaattccggacgcggaacgaatggaaaatccaatatggcctcctcccaggataaaggtgtttccaatccggacacggctgtggaaacgcgttccgttcccaaatccaccggcatgtccgcagacgacatgccttccgaattccgcaaggcgctggacgcctacaacaagactttgcaaaagtaagacgcacctctccggcacagccctttcacgcatgaacagcaacttcccgtttccatgaaaaatacccgcctcctgcttaccgctttcttgacctgctgcatgacggccacaccgcaaaacgcagcggcccaatcccccatgagaacgtcttcttccgtgcctccccaggtggaactgatgtatgtgaaggggctacgctatcttcagaatgcccagaaaacggatggaacctatgatggaacttacgggagggagcccggcatcatcggcttttgccttatgtccgtgctggctcacggagacgacccgaacgcggggccgtacgccaccatggtgcgccgctgcgtagattacatcctgtccaagcagaacaaggtatccggctacattggggattccatgtacaaccacggcttcgccactctcgccctggcggaagcctacggcatggtgcgggacgaccgcataggccccgccctccgcaaggccgtagccctgacgctgaccgcccagaaaaaaaacaaaacgggaggctggcgctattccccggaatccacggacgcggacagcacggtgactggctgccagatcgtctccctgttcgcggcgcgcaacgcaggcattcccgtgccggacgaggcttttgaacgcggcctcaagtacatggcttcctgccgcgacaagaaaggcgcctacggctacaccgggccggcgggcccccgcgtcaccctcacggccatcggttccctgacgctgtccctggcgcgccttaaaacggacccgtccttcaaggattccctggcctacctgaaaaagcacctgaattaccgggattccacttatccgttttactttgaatattacatgtcacaggccctgttccatgcggaccaggaagtgtggaaggaatggaattacaaaaatatgcgctatctgggagcctcccaggcgcccaacgggtcctggctttccgatcattccgcggcatattccacttccgctgccctgctttccctcgcgcttaattacagatttctacccatctatgaacaatagaatccgcctttccctgctgctggccccggcctgcctgctgaccgcctgggccaattccgtcatcgacgtggttacggataacaattaccgcctccgcggggaaatcatttcttacgggaaacagggcatcgtcatcaagcacccggccatgcgccagaacgccgtcattctcccgtcgggaatccgcgctctttactttacgggaaccgcctctccggatcttcgcgcccgggacaaaattttcatggctgcggggcacagggacattatcccgtgcaatatcatttccatcacacaggacaaagtgcagtaccgggacatgctgggccatgaacgttccgttccccgcagccaggtggccgggttccggctgaatacgctgcaggaaaagggcttctggcaggaaccgctgatttttgacaacagctgggtttattccggcaaccgggaggaagactaccgcacccaggcggggagaaaactgatgaatgccctgaagccgaaagtccagggagacaagtaccagtaccggctgggcaacaatgattaccccacctggatacccctgtacaagaatatcggcatggatccttcctcctttaccttccgcaccaccatcaccatggacggcaataatgaccgctccggcattgtcttctgtttcggggggaatgaaaatattcctttccggtccaattccggcagcaacctgaacaggctcatgctcagcatctcgcccggaaaatgcaccctgctccgggaacagaaatccggcatcctcgtgctgggggaagcggccattccggcccccattctgacggagggcgtggatattcaattgacagcctcccgccagggtggaaacaagcaggtttacgagctgttgataggcgatctgccgcccagactgataacagaccccagcccgccggaacagccattacagggagacgccttcggcctccagatggaagggcacgtgtccctgaccatcagcaaactggccctttcctccatcaccctgagcgccaaatccgtggctaaaaacgggaatgcagagacagaccttgtcctgacaaaggaagaagacgccattccgggttccgtcagcggttacgacagtaaaaccggaacgctgacgctttccacggacaaggattatccgggcattccccgtgatttttccatcccggccaagtatctggataccgtcttttttgcggaacagaacaggaaagacgactcccgccccccagcccgccacagcctccagatgaaggacggttcccgcctgcacggagatattctgagcatggattccctgaatatcatcctgcggcatccgcagctcggacagatttccctgccgctgaaaaacatcacccgcgtggaattcctgaatcccgcccagccatcccgttccactccctgattgatcccgccatgaaacaggcaattacgcttttcctgtgcgcctgcgccctgccgaccgctctccttctgccccatgctcgtgcggaaggtgtcattacgcttaaatccggggaaaaactgccgggcagcatggatacgatgaaccgcccttacctaaaggtccgttccagcattctttccaaacccgtggatgtccatatgggagagcttgacgagctgtcctcttcccgtccgctggaaataccggaacagttttccatcatcaggctggccaatggggacgaggtttacggcaccctgaaggcgctggatgcggaaaatcttcaactccaaaccgcttggggcggcctgcttcaggtggaccgcaaatatgtgcgccacatcgggttcgactcacaaaaagcctacctgcgcaacgctacggaatccctgcagggctgggagtcttcagccaaaagcacgctgcccgaatgccgcaacggatactggctcatgcgcggctccaataatacggaactgcaaacttccttccccatgccaccccgcctccatgtgcagttctccctttaccataccaatacgttccggattaatcttgccctctggaaggattccgaatccggaaacagcatcaacctggatctctccctggaaaaagcggaactttccaagaacagttccggccagtaccgaacgcttggcagggtgaaaaggaacacggagcggaactggtatgccgacaagagcgtcaagcgttccgacgttcatttttacgccgatccggaaaagggcaattattacctgtacgtcaacggtgaacaggtagcccggtgggaggaagtcaaagagatggacactatctttgaaaacgagagcggagacaatgaaggggaagatggagaaagcgccgggaaatacgaattcaaaccgggaaacactcttgccctgggaggttatgacagcttgaacatggccgtattccatttgaatgtatttgactggaatggagccattccccatctggaggaggagctggacatcatttcccgttacgacccgaccgcccccagagacaaggccctgctggtaaacggagacgtgctcaggggagccatttcccttcaggaggaaggctccatccgcatcaagtccgaccattatgacgtcaccgttcccaccgccagggtacgcgcactggaccaaaaaggccatgaagagaaggaccttccggaagacagctcagacacccgcgttttcctgacggaccagagcgtcctttccctggccctggaaactatccggaacggggtcatggaagggcgctcatccgcagtcggcaaggtccggattccgctccaatccgtcagaaaggtccagttcaacctgcaaaacccggagctgaggaagcagagggaaacgccgttccggtgcaaataaaggcttctccgccaggccgtcctttccggagaaagccggctgccgggaaagccagaagaagcatccgttaccgctcctccatttcctccgcgcgccgtacggcacttttcaccgcctgaatccaggcattgcggaagccgcattcatccagcgcattcagggcggcaatcgtggtccctccgggggaagtgacctcatcccggagcgccatgggatgcttcccggtccgttccagcatcagggaagccccccgcatggtttccgcagccagccccaaagcggttttcctggacaatcccatggctacccctgcgtccgcaagcgcatccagagccgtaaacatgtaggcagggccgcaaccggaaatggcggaaacggcattcatcccggattccgccaccttgtaaacggagccgcagccggaaagcagcatccgggcagcctcttcatcttcatcttttacgccgtttcccgtactgtaggcgatgacgcttaccagcaccatgcacggggtattgggcatggcgcgtataatgcgcgttccgtcgctggcacaggcttccatatcatccagggaaacggcggctgcgatagaaatcagaaggggaagctccgccccccgttcggaaagagaggaaatgagcggaaggacgccgtgcggcttcacggccagaatcaggacttccacggcgtccgccacatccgcctccgaggcagcttcatgaactccggggtattcctcctgcagggcctgcacgttttcatgatgatgatcgtacacccaaacttcctctggaaccgctgctccggatttcagcatgccccgcaacagggcgcctcccatttttccaagtccgatgatacctgttttcatggttgataattttttacagtcaacatataagcgatttatagaaaatggaaatgccaattaaggcccatggttatggacgagaatgcgtcatttccgcgtttgttccctccggccctgttatcaacgtctctggctggacctgcggttgggattttgcgtactgggccgcgttgcagaaacagccctcaatatggtcgttgacaaacccggttgcctggaaaaacgcataacagatcgtcggaccgaaaaacctgaatccccgccttttcatgtccctgctcatggcttccgactccggagaaacagcgggaatctgagccagagcgctgaaatggttaacaacgggctgatgattggggaaaaacgacaagacgtaccggtaaaaactgccgaattcttcctgaacggccataaacagtttcgcattattgacagcgctgttgattttcaaacggtttttgacaattccatcaaatcgcatcaaccgttccacatcttctgccgtcatccgcgccactttctccacatcaaagccatggaaggctctccggtatccttcgcgcttccggaggatagtaagccaggataatcccgcctgggcgctctccagcaccagaaattcaaatagggttttgtcatcggaaacaggcctgccccattcttcatcatggtattttatgtaaagttcatcggttccggcccagccgcaacgcgcattgatgatatccttcatacggttgcgccttagaattcctttttcctgaacagccacgccgccagcgtcatgtgaaagacgaagtatcccagcgtaatcagggccagggttccgaacagggaaaggggaataagccgtccgttcagggcggaatccgtcacggaataaatctggaaattcggaaaaaccagggaaaagagcctgctgcccgccacctcccaccaggaaaggccatccgtgccggatcccacccacagggaaagagcctgcgtctggaacagtcccgccagatagatcatgaacgtcagcagcgcgctgataatggtgccgttcgtcacgcaggacatcaacagcgtgagggaggaaagcacgacaaactcgcacatcatcacgcccagccccgtctgcacgttccaggtagctccctggaggcggatcctgtccaggtacggctgcatttcctccaacgtataacggcctttcagcgaggctatctgctccgccaccaccgtatccgtccgcatccacagcaccagcgtcattacggcatccatcagcagcacggcaaccagggtcagggccagcacccccagaaccttccccatcagatagtcgatgcgcggcaccggtttgcaaaggatagtgtatagaatacggtcctccgcatccctgggaataatcagggccgtggccgccacgcagaaaaagaggccgaacacccgcatggcaccgtaggcggagtttttcagcagcacgagttcattgattcccccggtttcaggtcccagcaccgcgctcaggcggaaggaactcagagccagcagcgccacggcgaagagcccaagaaagagaaacaccttcatgcgcaccagctgcgtaaaggtggtaccggcgattacggccatgcgcccgggcgaaggtatataaccggaggtaatccatgccatgcggatcatcttgccgtattccggagcaaataaaagagctttttatttcatgtgctgaactccttccgccttgaagaagcgcttctcccgtgttctcatggagcgcgtatgagtttacgatcccagctggaagaactgctcccggaacttttgccttccgatccggcccaggccattaagggaacagaactcatccgcctggtgcgcctgaggctgggagaggaatattcggacgcatccctgcgctaccatttttctttcatggcttccgagccggattcggaaatcgccaaggtggaacgcggccagggctattacaggcgcatgagggaacgggacgggcagcacgctcccagagggcttttgcccctgttcctcggggaaaacgaaccggacgccctgaactgccgcgccaaggcgctggccctggccgtgcgccagtacgataccacgggccgcggcgttttcgtgttcagtaccagtgaaaccggaacttcctgggtaaaaccggatctggccgttgtggaatggccggagggggaatgggagggaaacgcgcttgtttttgacaaaagcgcacttcagcgccgccgcatgatcggggcacccatgatgggcatccgcagcgtctgcgtagcccgcatgcccggtggagaagacggcagaagggaatttttcaggactctggccacgtcccgctgggcacagtgcggagaactggtcattgtgggggaactgccggatgattccgaatgcgccgccctccgcgggctggccgccgagttcggcgtaggggtgctttgcctggaaattgcggacgaacgcctgggagagctccccggcgcggaggaaattttcaaagccggagatgaagaatgcgccgccctgctggcggaactcacacccgtacggctggccgccggaaggctgaagacgctggaggctgatacgggggaaaccctgggcggggaattcggagccctgttcgactggctggccgcctgcctggaacgcggcagcgtggaagaatatgaattccgcgtctcctgttactgaatgcggcggagagattcttgacagaacttgcgtattaaattaaagattttcccggctccaacccgccctttcccctgacatggaacaagaaacactggtttacccgcttgcggacaatactgttctgcaagacaaatatacgatattgagcgtgctgaacgccggcggcttcggcatcacgtacctggctctggacaaccccggttcccggtatgtcgtcatcaaggaatgcatgccggacgcctacgcctgccgggatatggaaaccggcgttgtccatccccggaacgaacagaccgccgtcaatttttcccagagtgtttccaattcccggcaggaggcttccgtcctgtcccagctcaaccatcccggcattgtccaggtgtttgacatgtttgacgccaacggcacctgctattacgtcatggagaatatccagggacagaccctgttcgacctgatgaccaccatgcacgccaccgggcaaaccatggaaccggcccaggccacggatcttctgttccgcctgctggacatcctgcactaccttcactccatgggtgtgtaccattgcgacatcaagccgagcaacatcttcatccagccggacggaacgcccaagctcatcgacttcggcgccgtgcgcaccaagaccctccagcatcaggggctcgtccagatcacgcccggctataccccgccggaattctaccccggacgccggagcgaaataggtccctggtgcgatatgtacgaactgggcgccacgttctacgaattgctcacgggccaggttccccatcctgcggaccagcgttccgtggtggaccgcaacccgaaagtgaccagttacgcggccctgcggaaaacttatcccatgaacttcctttccggaattgacaaagccctgtcgccggacgaacgcaaccgcttccattccgccaaggcatggaatgactatatcaacgccatggcggcagcaggcaccctgcaggccggcggggtatcgaggaaggctcttccccaggccaggaaaaaatcttccgcaggcacggctttcctcatcatcctgctcatcgcaacggcaatcggctgggtatgctggaaacagggtctgcttaacttctgattccggccgctttccggcggaaacattgaagggtgatgtccgcaaagacacgcctcccccaacgcaacaagggctgaacctgacggtccagcccttgccaatccggaattgaacgggagaaacagcctttacaggctttccccgaagtcccggcggtatttggccgccagtttttcaggccagtcgctcttggcgcggagcttgcccatgaagaagcgcaggacgggcggttcctccacaaattccaggccgccaatcaaatcgcggttgtcatagagccacttcatgcggtccgccacgtatttcacctgggataatgtgaagacacggcgcgggaaggccaggcggagcagttccacatccgccagaatgtccttgccgttttcgtcgcggacgctggaaagcgtgccgcgttccatgccgcgcacgccggaggcgatgaagaaagccgccgccaaagccccggcgggatagtcctcctgcgggatatggggcaggaaacgccctgcgtcaatatgggcgcccagaccgccagcgggggttacgcagggaatgcccatgtccaccatctggccgatgaaatattcaatgaaggaggggctctgggaaatcacggtcaaatccgtggtttcatacaggcctacggccatggcctcaatttcccgcacggagatgccgccataagtcaaaaagccttcaaagaggggaacgagatgctccattttcttggcaatggcccggtcgttcgtgcagatgccgccgccgcgggaggaggaaaccttgcgggcggaaaaatacaccagatccgccagtccgcacatggtcttcaggatgtccgcgcaggacgcatccctgaactcgtcttcacgcatcttgatgaagtaggcgttttccccgatcagggaggcgtccagcaccagcatgatgccgaattcatcgcaaatgccgcggatttcccgcatgttggcaatggagaagggctggccgccaatcaggttggttgaggcttccatgcgcacgaaggggattttgcccgccccgtgacgggcgatgcagtcccgcagcttgccggggtccagattgcccttgaagggattggtgctgaccggattgacggcttcatcagccaccagttcctcaatcttgccgccgttcaggtcaatatgggcgtgcgtggtggtgaaatgatagttcatcggaaccacgtccccgggcttcacgaaggtgcgggcaatgatgttttcacaggcgcgcccctggtgggcgggcagaaggtattccttgccgaagacatcccggacagcctgcttcaggcggtcaaagctctgggaaccggcataggcgtcatccgcccggaacatggcggcgatctggttgtcgctcatggcgttgacgccggaatccgtcagcatgtccagatagacatcgttcgtgctgagctggaaggtgttgaacccggcttcccgtgcggcttccaggcggcgttccacggggacaagatgcagcttctgcaccacgcggactttatgcagttccaggggaatttgttccccattgtaaaatttgacaacgttggatggttctgaattcataaaataaaaggtaaacaaaagtgtagcagaatgaatcttttccgcaacataaaaggacaaacggcctttttttgcctcccgccgtaaaggcaggaatgacgctggaaggaaaaatgtggaactttccggagggagtttctagcgtggctccctatgaaaaaatactggaaattgattcaacagcacctgggcgtggatgcggacggcatccccggccccaagacggcgctggccctgctggacaggctgggcatccgccaaccggaacaatcctggcccagccaggaggaagtgcgctccgggaaatccgtcttcggccgtgcgggtgatgaaagcaacatgaccagcatcaagctgccttatatcatgcggctggcgtgggaaacaaacacgaccgtttccaccatgcgctgccacaagctggtggcggaaccgctcgtccgcatcttccaggctactctggaccattacggcatggagaaaatcagggaactggggctggacctgtacggcggctgcttcaacaaccgctccatcatcggcggaaaggccacatccatgcacgcctggggaatcgccgtggacatggacccggacagaaacggcctgaacatccccgcgccgaaagcggtattgtccggaccggagtacgccgccttctggcgattcgtggaagcggagggggccgtatccctgggacgctcccgcgactacgactggatgcacttccagttcgctactctttgaccggagcggacgcgaacgtcctccagccctcctcccagcggcggcggagggctggccagtcctcaccgttccctccatgccccaggaaagagcgctttttcagctcccggaaactttctccgggaaggtggagaagttccccgcggtcataggcattctgatcacacatgccgttaaaaacgggagtccactgccagcggcgcacgcccagataacttttgaatgtatctaccagttccgtcgtgcagttggcggtgacggtatgataatagcgcgggcgttcatggaggctgttgattttttccgcaaaccccagaaaggcctttttcaggctttccctgccgatgttgatgcggtacaggtacatgtcctctttccggtaattggtgcgcagggcgaacaggtcttcttcgtccgccaggatgtaaatcacgttgaattgcttgtaaaggccagggacacttccctgctccaccccctccggcaggcgcgtttccacggacagggccagatgcttcccatcctcaaaaccgaaggacaacatggtatgggccacgaattccatcccatcccagtggctcacggcaaaatccagcgtagccagcttgtccaggtcaaagcggcgcgtcacatagcgcgcgtcgaagtcccgctccgtccggtagataaaactgcgcacgtccttcaccacgatttcatttccgttgatttccacggaggacaggcgactccaggacggctgccattccttatcgttcgtcgccggtatgcacaggtagtacgccagcagcagggccggcactccccaggaagcgcgccataatacgggccgttttccgcggagagcgaaggcgcatgccatggccgccacgtacagccacaccagcacggctcccccccatacgttgtaaaaaaccacgcccgccgcccatacggagaaacagaaccacgccgccgtcatcaggatgcgggcggcggccgggcacgcgcggcgcaggaaagtcaaatgcatggaaaatgaaaagcaggccgcacgctccagcccatgaaacgcgcggcccgttaacggggattacctgaaggaaaggcccttcactttgtccgtcagggctttcagcacgcgctggtgcgccgcatccacttctgcggccgtgagggtcttggccggatccctgtacaggaaggtataggcaatggatttacggtctgcaagcagcttttcgccggaggggtccgtgaacacgtcaaagcagaaataactgacaagcagtttttcccgtgcggattccacggccttgacaatgtccgcattgggcgtggagaggggcagttccatggccgcatcgcgggaagaaccggggaactggggcaattccgcagccttcacgggcgcggtcaggatttcctgcattttacggagatccagttccgccacgtacacgggctgacccaggcccagctcccggcaacgcgccagggacaggcgggcgaaatagccgcaggctttcccgtccagctgcacgtccgcccccagggcggcctgttcgcgcggtctggcaggcgtaagcgtaaaacggtggcccggcgccagagccgccatcacggccagcagatcctcaaaggaggcctgctccggcctgggatccgcccaggaacgtgccgtgcggtccccggaaaccaggatgcccagggtatccgtttcaatgtccctgcccttgccgccgcccgtattgcggaagacgcgtccaagttcaaagaagcgcaggccggaaacgccctggttgctgttgcgcacggcggcggcaatcaggccgggcgtatgggcggggcgcagcacggagtgatcctcgctgagcggcagggatacgcggatgaggtcaccgtcctgaagggggcgcagaggcaaagcgtccttcacctgggcgatggtgccgtccgcggattcggaggcgatgagcttgatggtctgggtttcataaaatcccagggccgccagcttgcggcgcagctccatctggaagttataggccgcatctaccggggattccgccacgaaggggccggagaagcgggacggtatgccgtccaggccgaaaacgcgcacgatttcctccagaaggtcgcacgggcgcgtgagatccaggcggtggggggggatcagccagcattccggtgaatccggaacctgcttcaggcccagcgccgtcaggatgcgagccccttcctcatgagaaatggaaccgccggaaatctgatccagcgctttccagggaagttgtacaaagcccagttcattagtcaccgtggcgcccttcccctgcttcagggaagcgaacacggaaacggggccgtccgcccctccgcaggaaggcatggaagcatgagccggattaggaacgggagaaccggccacatacgttggggaggccgttccgcccgccagctgaagaatcagttccacggcgcgcacggaaccgcgcaggacattccaggcggaagtgccgcgttcaaagcggtaggaagagtcggaggacagggccagcctgcgggacgtggcgcggacggaggagggcttgaaccaggcggactccagaatgatatccgtagtggcgtccgtcacgccgctttcctccccacccatcacgccgccgatggcgagcgcattgccggactggtccgcaacaaccagatccgtgcagttaagcgtgtattcctgcccgtccagggccttgatggtttccccttcataagcggtgcaggtgacgatgccgccctgcactttcgccgcgtcaaaggcatggaggggcgttcccagttcatgcaggacgaagttggtaatatccacgatgttgttgatggggcgcaggccgacggctaccaggcgttccttcagccattccgggctttcctgcactttcacgccgctgatttttacggcggtgtagtacgggttcagctccggctggtccagccgcacgaagtctccggcgggttccagcgccactccggcgtcgtcaatggaaacaggcctgtacccccggccggagatagcggccagttcatacgccatgccattgtgggaaagcaaatccggccggttgggcgttacttccacttccaccagggtatccgccttgacaacctgggaaatcggcgtaccgggttccagttcctgagggagaatccagagaccgtgctccttgtcgggaagccccagctcggaggcggaacagagcatgccgcgggactccacgccgcgcagcttgcccaccttgatttcaacgttgccgggcagcaccgctcccggcagggcgcaggggaccttatcccccaccttgtagttctgcgcgccacacacaatctggtgcagcgtgccgtcgcccacgtccacctggcagactttcagccggtccgcctggggatgctgttccgcggcagccacgcgggccaccaccacgtatggggaatccacgccctgctggcggatgtcttccacctcaatgccggcaaaagtcagcatgtcagacatttcatccacgctcaggccggacaggtcaatgtactgggaaagccagttaagggaaatcttcataacgggaaaacaggtaaaaattattggaattgggcaaggaagcgcacatcattctcaatcagggcgcggatgtccctgatgccccagcggatcatcgccaggcggtccaggccgatgccgaaggcaaagccggtcagccccgtgtagcgggcctgcgctccggggtccaggcccagttcgcggtccacggcttcaaaaacattgggatccaccatgccgcagtaagcaatctccacccagcggggggcctggccgtccaccttcagcttgacgtcaatttcaaagctgggttccgtgaacgggaagaaatgggggcggaagcgcacctccgttccagaaccgaaaagggcgcgcagaaaatattccagcgttcctttcaggtcgcccacggaaacgtccgtatccacatacaggccttcaagctgattgaaggcggaaaggtgcgtggcgtcaatttcgtcgcggcggtaggcggaaccgggagcgatgacacgcacgggcggcagctgcttttccatggagcggatctgcacggaagacgtgtgcgtacgcagaagcttgccggaatcaaagtaaaatgtatccttctcattgcgggccgggtgatcttccggcgtgttcagcgcgtcaaagcagtggaactcgtcctcaatctccgggccgtccgccagggcaaagcccatgtggcgcagaatgcggacggcttcatccctcacgatggtgaggggatgcagcccgccaggcggcagggagcgggccggaagcgtcaggtccacaccggccacggcggccttgtccgcctgggcctgcacttcttccagcttggcgtccagagcttccgtaatgaccttgcgggcctcgttaagcaactggccgacggcgggcttttcctctctgggaacatccttcatgcccgtctgggccagggtcagttccccttttttgccgaggatggccacgcgcgcgtcttccacgccgcgcctgtcagacgcctgggcaatgcgtgccagggcgtcccgttggatgcgtacaatctcttccttcataaaatttgacgggcaagagcttacccgtcccccccgccagcgtcaagcccttcgggccgcggggaggtcactcaaaagaaaatggcggaccccggaaaggggggaaaagaacaatgaacctctcttcctagtcactaatccttaaccattaaatatccccagcaaattacacgtatcccggccgggcggacatgcggccggaaaccatgccgagcacgcagaaaaaggtataaaccaggcagaacggcaaaaaggagccgccctgatgcaggaaggaagtaaacagcaggctcaacagggcgcccatggtaaagccgattccctgggacatgccggaaagcctgattgattcggaaggggtccgggcccgttccaccatcagcgccattccgcggctgaatacggttcccgtcgccagaccgaacagaatagccatccagagagcccagtccggagggagatacaggatgccccagcaggaaagggccgccaatgccatggccatcacaatgaggagcccccggccgcccgtagccttttccagcacgtgtgcggaaagcgtggcgggcagctgggcgaacatggccacggaaaggatgaacccggcatcctcatagctcatgccccgctgcctcagaaagatgggaatccaagtataaaagaaataggccgccccaacgcggctcaagtaaaaaacggtaacctgccatgctttgccgctgcgcagcaggttgtgaccggaagccgccggatcgctttgaaacacgctagccgggtgcctgagaaaataagcgccccataccagcattcccagcagaatggggatgatccagacccccaggccgaaacgccagcctcccagcatgttggaaatgggaacggacaatccggaagccgcagcgctgcccacgccgatcatggcgctgtaaacccccatcatggcggaagcatggtcaggaaactggtgcttaatcagtccgggaatggccgccccggcaattcccatgcccagccccatcagaaccatgccgccgtataaccccgctacgccgtcccagctgcgccagaaaattccggccaccgccagaagctggaaccagaaaatgattttccacggcgtcatccagcgcgccacgcgtggagaaatgggagccgccacccccagcacaaagacgggcaacagggcgaacagccctgaattttccagggaaagccccatatccctttcaatcgttcccagcagcggatcgggagaatcaaacccggtacgcaaattgaagcacacgattaaaaaggcgacaaacagcagcatctttcccctgatgcctccggaagtccctgccttatccatcccatgttatacatccttgcccccgcccctgttcaaaagtaacagccttccggctgtcagcggtccgaaaacacggcatgacggaaagaccatcaggagaaacaatctccctgcggctttccatcccccctgccatgaaaaagcgccgccgtcccggagaacggcggcgcccgaacacgctaacctcttaagctttcatttggcagggcgtttgccgtacaccagcgtccgcctgccgtcccaggaaacggcttcaatccgcgtagaaccttccggatagggaaccgtggtggaggaattatccctggaatccgtccccaccatggtgatgcggaccatttccctgtctttgtatgtttcaaagacgacagcgtttttccacacgtcatgggaaacaatgcgcctgttgccctgctccgtaacgccctggttgtaaacgccgcggacaggcaggcggttcttatatgcttccgcgctattgacggaaatatagtaaatgacggggctttccggctttttgtacttcctggcgtaggcaatcaggttcttgcagtcggcctccgtgatggtcatgcgggcgcaggtgtagtcgtccaattcctggtcaatgggcttgagcatgcccgttttccggaaaaaatccgtcaggtcctgtctggcggcgtcgcaggcgttcttcatgaacgcaagctggagctcgccgtccttcttgcccctggtatccatcttgatggccttataaaagatatccggataaaagtcgggattacccttcccggctaccttgaaatacagctcaagctgccacaggggggccagcttgacaaaatggtcgtgcaccatcggacggttatccccgccggaacgcttgtccggcccgctctggacaagccagttttcccccttcaaaatgccgttattcagataggcgttgaagcgtccgccaatcatgttgccgtccccgccgttgatgcgttcatgctccaggcgcatgctggagggattcagcatgtaattcacgtaagcggagtaaatgttattggtcacttctccggtggagacccatttcatggcggggcgcacctggttgacgtggccgaactcatgggcaatcccccaggcgctgccgggaatcctgtccggattgccgacctccttcatggtaccgttatgaaaggcggcccccgtgccgtccgcatgcatgaacccgttccagatcacacggccgaacatgcggtttttgggcagcatcctgtacttgtacaagcccatgatctgctgctccatgccgataatcctgtcgtacagggcaataagctcctcccccttgtccggacagaattgtttaagttcctccaccggatacaccagatgcacgcggctgcccacgatgtccacaacttccgtgggggagttttccagcatcttcttccagtcgctgtttttgctgacgcctcccacgaaaactccgttcaccttgccggacagaatggataaatgcaccttgggggccttcttataattgggggtgaaatactcaatgtagccaagccccttgttcttcgccctgatgatgttgaccccctccttcagcggataggagctgtggcctccgtcccgcccgaagttgtggataaccagattcagcttttcacctttgggatcccccatgaccagcaacacgtcctccccctcctcaaaaaagatgccggtgggattttcaaatttgctgtactggctggtacgcaggcgttccgccagctccttgaccggttcatacggttccgccgtaagggcgcgggccttgcggtcaaatttcttctccgccatccgcgtggcgagcccgcgcacaaaggggtccttgattctggcgatgcggtcgcgcgtgacattgggcttcaacgccagcatgtattcattggcgaacacattggaatccaatgctttcaaaccctcctccgtaatcggcgcaccccctgcttcctgggcggaaagcacgccgccgcccagcacgccgcagagggccagtaaaagaaccccctttttcaacaatggtgagaaaatcatatttgttaaataatactgttcagtttccggaattgtttcaaggaaaaacgcccggcccctcccatgcccgggaaaaagcccctttgtgtgacatggaacgctcaggcccagggagaaaaactgtccatcccccttgacgggggccgtataatgacgctcgcaaaacatttttccatatgaatacagaaacacatcaatttcaggcggaagtccggcagctgctggacattgtcatcaacgccctttacagcgaccgtgaaatctttgtccgcgaacttgtctccaacgcttccgacgccctggaaaaactgcgcctgaagcagctgacggactccaatatttatcagccggacaagcccctggaaatcaccgtagccacggataaggaaaacaaaaccatcaccatcgcggataccggcatcgggatgacggaagcggacctggtggaaaacctgggaaccatcgcccactccggcacaaaaaaattcatggaagcccttaagcagaagcaggaaggcggagcggacctgatcggccagttcggcgtgggcttctacagctctttcatggtggcggaccgcgtggaagtgttcacccgctcctatgaaccggaagccgcctccctgcgctggtcttccgacggacgggaaggctacagcatcgaaacgctggcggaaccgctggaccggggcacccgcatcgtcatccgcctgaaagacgaatatgaagaattctcccaggaataccgcgtcaaggaactcctgcgccgttactccaacttcgtggggttccccctcaacttcaacggagaacacatcaacaccgtccaggccatctggtccaagtccaaatccgacgtgaagccggaggaatatgacgagttttaccagttcatctcccatacggatgaaaagcccctgtcctacatgcacttcagcgcggacgcccctattgccctgaatgccctgcttttcatccccaggcgcaatccggaaatgttcggattcggccgcgtggacgccaacgtggccctgtactgcaagcgcgtgctgattgacgccaagccggaaggcctgctgccggaatggctccgcttcctgaacggcgtggtggacagcgaagacctgcccctgaacatttcccgcgaaatgcttcaggacaattccctggtgcgcaaaatcagcgacatcatcaccaggcgcttcatcaggcatctggaaaaactggcgaaggacgataaggaaacctacagggaattctacgcgcaattctcccgctacctgaaagaaggcgtcgtcacctcctggccgaacaaggaatccctgggcaagttgctccgttttgaatccacgtccacggaaccgggggaaatgacctcatttgaggaataccttacccgcatgaaggaagggcagacggccatttacgcgcttaccggcccttcccgctctcatctggaaaacagcccgtacctggaagccttcaaggcccgcggctatgaagtggccttcttcacggaccacggggacgaattcgtgctggactccctgtccagcgtggacggcaagcccgtcacgatgatcgaccgcgccgacgtggaactccccgccctggaagaggaacagaaagacgccctgccccaagaggaagccgcggccctggaagaatggctgaaaggactgtacccggacaaattctccaaagtcaccctaggcaagcgcctggtcagcggagccgccgtagccctgcaaagcggcaatgacatggggccggaaatgagggcgtacatgaaagccatggggcaggaagtgccggaaagccacccgcagctggaactgaacccctccaaccctctggtgaaaaagctttccgccctgcggacggaaaacccggaactggcgcaaatggtggcggaccagatcgcgaataccgccctgctccgcgccagcatgctggacgatcccgccgtgctggcccagtcctcccaggccctgatggaacagctcctgctgaagtaggggcccggaagaaacagcttccttccccaacgccgctcccagccctccccgccgggggcggctttttcatttctcttcccgccatgaacgcgttacgccacatgccccgccacgttctattcctgaggctggcctatcaagcgggcatgtgcctgctggccctggtcgccgtaacgctgaccgccattgacctgacaacggaagcggcggaatgggaagtcacggcggaccgcaccatctactggatttttgtgctggattatgtgatccgcttctccatcagccggtccaaatggctcttcgttaaggaacacccctgggatttgctggccattattccctttgacgccctgttccgcctgttcagattcgcctcgctgggagaaatcttaaggctcgccagatatctggacctgttttcctatgccatgaggttcaccacgcgcatccggcgtttcttcaacacgaacggattcaagtatatctgcatcgccgccctggtcatcatcctgctgggggccgtaggcatccatctggcggaaggcatgagcctgcccaacggcatctggtggtccttcgtcacggctaccacggtaggctacggggatacctatccggtcaccacttcaggcaaattcctggctgtattcctgatgctcacgggcattggattcgtgggaacgctcaccagcaccatcacttccttctttctgagtccccacggcggagaagctctgccgtaccgggaggaggaaattgaggccatcaaaaagaaactggacgacctttcctccatgacggatgaagacatagtcaccatggcggccctgctgaagaccctgcgggacgctccccatccccacgctgaagcaaaggaggaaacatcaccttccggctcttccacaatctgaaaacaggtcatcttcaggagcgtgacaactctgtggagttatgaaaattccctatttcctccttcggcgccacaacgccgccgcaagtcccagcagggataaccccgccgttccaggttccgggacctgggaacccggatggttataatagatggaaagccatgtatatgaatcatcatactccgcttctatgcagggattatcatcccaattgattacacaaaaggcgggaacagtaagagattctgtatttgtaaacagcaaataacgccccggctccaaatcggcggaagccgttatatcccacttgatattgctcaattccataactgctggcatatttccacgaaaaacaatattcaaaatagctccattcctatttcgttctcccagctctacatgcaaagttagatcagataacaataaacccttcctagatgaatgatacggatcatcaccatctatatacaatgcattgcatccattcaaataccaatccgaatctttgttgagcaatataaaattagaacaatcctcataaacagcctgatcattattccagatacttttctctatgtaaatttcacttgcctggccaattcctccccaaaaaccaaagtgaaaaaaaccgcttagaagagccgttttcgtcatttttcctaataatcttttgcagcattgttccatggacaaagaaataacggattcctaatccgtacacattcttcaatgatttagaaccaaatccaacatattttcccttatactctctgtaatcattgtcccaaatattttcgtttttatatgattttcatatctatctaaatcacatttcagacttgcatacggattaggaatcctctgttacaacgttcttcatgaacatacctacttcctctttcccaactgacgcagaccaggccggaatcttcctcatccgttccctgggcattccgcccatggacgctttccttcttttaaaggatctcctggacaccagccgcggaagaggcgacagaataacccgggccaaacgctgcatacggctgggaggagaggctcttgccgacagggaaaaaagcgtatcgttttcccaggctgtccgcgccagcctggaagcaaggaaacaccgtcgtccccgcacgctgcaggaaatccgctatatggctgcccggatgatgaaaaaatgcccggagctggcaaggaagcaggtccgttccatcactccggaagattgcgggcgttatctccgcaaaagcttttccactccccgccagcggcacaaagggcggctgatcctgagcggcatcctgaattattccctgaagcgcgggtggtgccgcagaaacgcggcctttctggttcctccccccatcctcagggaaaaacgcatcagggccctttccctgtacggggcaaagcggcttctccacaccgcggaacagttgttccgaggggaatgcctgccggcctgcgccctgatgctgtacgcgggtatacgcccccacgaggtcaaaaggctgacgtggaagcatatcaatctgaaatccggcctggtttcactggcgcccacccataccaaaacgggagggagccgccatgtttccatccttcccgtgctgggttccatcctcagccggatgtcttccgccggttcccccgcccgttccgtctgcccgcccaactgggaaaagaaatggagggaagtaaggcgccggtccggcatcctgaagaaaagcggatgggttcaggacgtgctgaggcatacctacgcctcctaccacctggcccatttctgcaatcaaaaccttctccagaaggagatgggacactcctccccctccctgctgctggcccgctatcttaatatggagggtatcacctccgcaaccggcgccatgttctggacgcacagctttgtttctcccgctccgttaaaggaagactgacaaaaatccgtctggaattgcgcggtcaaaggcggacaatcccctgcgccgggagcgtccgtcgcccctcttttttcaacctttccgccattctccaaccatgccagcaaccagccctccccgcgcctgggccgaaatcgaccttggggccatccgccataacctgaatgtcgtcaaacaggcggccaaaggggaatattacatgcccgtcgtgaaggctggcgcctatggccacggcctggaacaggtttgccgcacgctggattcggaaggcatcgctttcttcggggtggccaatgtgggagaagcccggcgcatcagccaggcgggctgccgcacccgcccttacatcctgggccccgcgttcccggaggaacgggaggaaatcgtgctgaacggctggcgctccttcatttccaccatggaggaagccgcgcattacaattccctggcgcggctgtacggaaagacgctgcccatccacctttccgtggatacgggaatgggccgcggcggattcctgccggaccagcttgaagaactgctttcccgcctgggagaactggatagcctgcatctggaaggcctgggcgctcaccttccctgcgcggacgaggaccgggagattacgctcaggcaaatctcccgctttgaacagatggccgcccgcatccgggaaaaactgcctttgaagtactgccacctggccaacagcgccgcctccctggattatgaaattccctccaacaacatgtgccgccccggcctggtgctgtacggtttttcccccattccctccccatgggccgcgcaattgaagcttaccatggcccttttttcccgcctgacggtggtgcgcacgctgccgaaaggccacggcatttcctacgggggcacctttgtgacggaccaccccaccagggtggcgaccgtaggcataggctatgcggacggctacctacgttccctggcccacaagggcgcccgcgtcatggtggacggcgtttcctgcccccttctcgggcgcgtaacgatggaccagatcatggtggacgtcagccgggcgccgcacgcggaaccgggcatgaccgcagaaatcatggggccgcatatccccgtgacggaactggcggaaaaggctgacaccatttcctgggagatttttaccggaataggcccccgggtaccccgccactacaaccactaaaccaggcaggagggaaaagggccaagccgaccgcccatttctgggggcttctttcccgattgacggacagacagaaatatcgtttagttagccagtatgatgaaggtttccaccagaggacgttacgcgctgcgcctgatgattgacctcgcccagcaccgcgacgagggttacatctccctgaaggagatttccgccaggcaggacgttaccgtacgttatctggaacagattatcgccatccttttgaaagcgggattcgtccagagcttccggggaaaggctggcggataccgcctttccaggcatccgcgcgaatatactacggaagatatcctgaaactgacggaaggctccctcctgcccctttcctgcacggcttcccacgagaatccgtgcccgcgggcggccgtctgcgccacgctgcctttctggcgcgggctgcaacaagtcattgagaattatttgcgtcgcgtaacgctggaagatctggccgaacagcagaaggaaatcggctgcgactacggagcaggtatttaagcagcggctgcgggcctgaacatttccctttcctttcccattccggcccatgtcccgttttttttacccggagcttgacatctgctttccttttcattatttattccctagttttccgataggaatataaaaaccatgagtaagaatcatcgatttgaaacacgtcagatccatgtgggtcaggaaagtccggatccggccaccgatgcgcgcgccgtgcctatttacgccaccacttcgtatgtcttcaaagactcggaacaggcggcagcccgttttgccctggcggagccgggcaatatttataaccgcctgatgaaccctaccgcagatgtttttgaaaaacgcatcgcctccctggaaggaggagcggccgcgctggccgtctccaccggggcagccgctgtcacgtatgccatccagaacatcgcccgggccgaggaccacatcgtttcttcttccaccgtatatggcgggacgtataatctctttgccaatacgctggcggacgcaagcatagaaaccacttttgtggatgcaagggacgttcagaatttttccagggccatccggaacaataccaaggccctgtacgtggaaagcctgggcaacccgaactgcgacatcgtggatatggaagcgctggcggaagtggcgcacgcccacggcatcccgctcattgtggacagcacgttcgccacgcccttcctgttccgccccctggaacacggagcggacatcgtggtgcattccgctaccaaattcatcggcggccacggcacggtgatgggcggcgtgattgtggacggcggtaaattcgactggacgcagaacgacaagttccccggcatcagcaagcccaaccccaattaccacggagccgtgttcgctgaggtatgcggcaatctggcctatatcgtcaaaatccgggccaccctgctgcgggatacgggagccaccatcagcccgttcaattccttcctgctgctccaggggctggaaacactctccctgcgggtggaacgccatgtgcagaacgccctgcgcgtagcggactatctggcctcccatccccaggtggagagggtgaaccacccctccctgccggaccatccggaccacgacctttacaagagatactacccgaacgggggcggctccatattcacctttgaaatcaagggtggcgcggaaaaagctcgcaagttctgcaaaagcctggaactattctccctgctcgcgaacgtggcggacgtcaagtccctggtaattcatccggcctccaccacccattcccagatgacggaggaggaactgaaggcgggaggcattacgccatccaccgtgcggctttccattgggacggaacatatcgacgatattctggaagatctggaacaaggcttccgcgccattctctaacgatttaacggcagcaacgctcttttcctacaagccatgagaatttataaaaacattacggaactgatcggcggcaccccgttgctggaactgaccaattacgaacgcaggaatggcctgaacgccacgctcctggccaagctggaatacctgaaccctgcaggcagcgtgaaagaccgcattgcccaggccatgattgatgcggcggaagccgccgggaagctgaagccggattccgtcatcattgagcccaccagcggaaacacgggcatcggcctggcggcggtggccgcttcacgcgggtaccggattatattgcccatgccggagacgatgagcgtggaacgccgcaacctcctgaaagcctacggcgcggaactggtgctgacggacggcgcgctgggcatgaagggagccatcgccaaggcggaggaactggccgcgggactgcccaacagctttatccccggccagttcgccaacccgtccaacccggaagcgcatttccgcaccacgggcccggaaatctggaatgatacagaaggcaaagtggatatttttgtggcgggagtgggtaccggaggcaccatcacaggcgtgggcaagtaccttaaatcccgtaatccggacatccggatcgtggctgtggagccgttctcctctcccgtgctgacccagggcacagccagcccccacaagattcagggcattggcgcgggcttcgtgccggaaacgctggacacctccgtgtacgatgaagtcatcgccgtcaccaatgaagacgctttctccacagggaaggaactggcgcgcacggacggcgtgctgacgggcatttcctccggagcagctctctgggccgccacacaggtggcgcagcgcccggagaataaaggaaagaccatcgtcgtcctgctgccggacacgggggaccgctatctttccacccctctgtttacggactgattccttccattccctgccatgaaaaaattcaatctccatctctacctggtcacggatgaagcatccaaatgccgcctcagccttctggaaaccgtacggaaagcggcggacggaggagttaccatcgtgcagtaccgctccaccaatccggatgcgggaacctgttaccgggaagctttgcccatacgggatttcctggcttcccgcggtattcccttcatcgtcaacaaccgcattgacctggctctggcgctggaagcagacggcgtccacatcggccagagggatcttccggttccatccgtcagagccatgatcggcccggataaaatcctgggactgtccgtctccaataaggaacagctccgcgccgtggatgtctccctggtggactacctgggcatgggccccgtctttcccaccatttccaagctgaacgcgcctcccgtgctgggcgtggaaggcttcgccgctctggcttcccaatctcccctgcccgttgtcgccatcggcggactggacgcggaacgggcccgtcaagtgcgcgccacgggaaccgcctccggaattgccgttgtctccgccatttgcggagcggagaatccggaagccgccgcacgggctcttgcctgacggacggaccgcaggaaacactggacaatcaagcactttttaacgccatgctttcatcgacagaccttgttcaagccgttaccgccgatttggaaaaaatcagggaaacggccccgctggttctctccctgaccaattccgtcgtccagcccctgacggccaatctcctgctggccataggcgccgtccccgccatgctcaacgacgcggaagaagcggtggacatgctccgcagcggaacaggcgccctgctggtcaacctgggcaccgtgacgcgtgaacagggagccgccatgcaaacggcggtgcgggaagccaaccggctgaatatcccctgggtgctggatcctgtggccgtaggggctctttccctgcgcacgcggctggcggggcaattgaaggaacaatccccccgcatcatccgcggaaacgcttctgaaatcatggccctggccggctattcctccgtcacgaaagggccggaaagcaccagctccagcgcagacgccctgcatgcggccagggaactggccctgcacacgggggcggccgtgctcgttacggggcgtacggattattccacggacggccgccaggtaaccgccacggaaaacggccacgccatgatgtcccgggtcacgggcgtgggctgttccatgggagccctgtccgccgcctgcgccgccgtctcccccacccccctgcaggcggccgtttccacggccgtactcatgggcattgccggagaaatggcctttgaacaaagcccctcccccggttcctttgccgtatcattgctggacagcctttacgccctttctccggaagacgttgtccgcagagcgcgctttctttccctttgacagtcttctcttccccggaaagcaactccgctgccatgcacacggcctgacccggaaatctccggaaggggaagcacatcaccaggagctgcccgggagaggggaacctccggtaccctccccgctagaacaacctgcgccatattttcaggcatcccgcctgcggagcaggaagcggcatgccggggacctgacgaatcccggcacagccatttgcctatgccgaccgccagagcgccggaaccgcaagcggatttagtgttgagaaatacctgcggccttttataatggaggcaacccatttcagcatggcaaactccactaccacgcaaaaactctgcaactggttcattcagcaggcgaacgccaaggggctcatcctgacgcccgtcaaactgaaccatctggtcattctggcggactggtggcatctgcaccggactggcgctttcctgatcaatgaacgggtggaagcctggccttccggtccggtactcccttccatttatcatgaatacaaggatcagccgccctactcttccatagagcatcccagccgccgccagccccctttggaggaggaaacggacattatcccctttctggagcatatctggaacgtctatggcaaatatacggcccagcagctcggacgcatcaacaccgccccgtcctccccatggaagcagtcccagggcaggcatgaacaggcgcaccgccagcaaatcacggaggagcacgtactggcgtactttaaaagcctggccggataattccggaaaaaacagcctgccgcttacctgtacagcctttttccaatcaaaacatatctttgagtaaaaaaaaacttgcaaaaaacggcctcttccgctttaatgcgcccgcgccgcaaaagcgcccgttacatagccctatagtgtaatcggtaacacagcggattctggttccgtattttggggttcgagtcctcatagggctaccacttctaataaaaaggccgtctctccggaggcggcctttttattttctttctattaccgattccgcgccggacaacaaggagacggcaaaaaatctggaagcaaaagatgattctttgacagaatctgtttcctccccgtttatattggaaatatggcacggcccttacccattctcggcggcattctgctctccttctcccctccggcagaagcaacagcccaatacagcattatccctgagccgtccagaacggaactcaggcaggaaacagctaaaactttacagcttctttccgaccaggaagttccgaccctgggaacggacgcctaccggctcacggtcaccccgcagggggcgcaccttgcttccggaggaagggaaggcagaatttacgggctggcaaccctccgccagctccgggaccagctggcgggacagccggagggcattccctgcggcgtcatcacggacaagccgcgctatccgtggcgcggcctcatggtggatcccgcgcggcatttcatccccgcggccgatctgaaaaaatttgtggatatgatggcctactacaaattcaacaggctgcacctgcatctgacggacaaccagggctggaggctgcccgtgcccggctaccccaaattgaaaagcgtcgcatccaggcgggaggaaagcttcggagatggaatcccccacgaagggatgtacaccaaacaggaactgaaggagctggtggcgtactgcgcagcgctcggcattgaggtcatccctgaaatagacatgccgggccacaaccaggcgcttcatgccgcctacccggaatttttctgcttccccaaaccggacatgaacgtgcggacgacagcgggaaacagcaaggaactggtctgtccccagaagccagaagtctggaaattttatgcctccgtctttaatgaactcaaggatatcttcccgtccggcatcgttcatctgggcggggacgaggcacccacggaactctgggaaaaatgccctctgtgccgggaagcccggaccagggcagccatgaaagacgaacaggaacagatgaaagccttttttgcgaaaacggcagctctgcttgccaaaaacgggcaaacgccgcaattctggtatgaggggaacgccggcatttaccatccgggggaaacggtttacgcatggcggcaaggccaggccctccagtccattgagaagacgaaaaaggcgggattgaacctgattatggcctccagcgaatactgttacctggattttccccagattcaggggcagcacaactggggatggatgcaaaccaccaccctgcaaaaatgttatgaactggatcccgcttttggaaaaccggagaaagaggcaggccatatccggggcgtgcatgtccccgtatgggcggaacgcctgccggacttgaaccacttgctttaccgcgcctatccccgcgcctgcgccattgcggaagccggctggtcaccgatgggcgtgcgctcctgggaaaacttccggcgcaagctggccgaccaccgtcaattcatcctcaaacgcttcaattatgatatggagcgcactcaggggaatgaaccggccttccgctgggaaaacaacaagtaatttcaccgtttttccttatcacgcatcccttaccatggtagaatcttttccgaaacagttcttcatgatgtttaaactgcccctcatcctggcctgcgccattttttccgcccacatggcatgtgccgccgcagcggacaaatacagcgttatccctgaaccggaaaaaacggagctgcagcacaacagtaccagaaccttaaaacttctttccgaccaggaggctccgaccctgggaacggacgcctaccggctcacagtcaccccgcagggggcgcaccttgcttccggaggaagggaaggcagaatttacgggctggcaaccctccgccagctccgggaccagctggcgggacagccggagggcatcccctgcggcgtcatcacggacaagccgcgctatccgtggcgcggcctcatggtagatcccgcacgctttttcatccccacggccgatctgaaaaaatttgtggatatgatggcctactacaaattcaacaagctccagatccacttgacggacgaccaggggtggcgtcttccggtgcccggctaccccaaactcaaaagcatctcctccaaacggaaagaaagcatgcgcaacggaatcccccatgaagggatgtacaccaaacaggaactgaaagagctggtggcgtactgcgcacgcgcggcattgaggtcatccctgaaatagacgtgccggggcacaaccaagccctggcggcagcctaccctgaattcttctgcttcccgaacccggatacgaaagtgaagaccgatgaaggcgtcaccctccacctcatctgcccgcacaaaccggaagtctggaaattttatgccgctgttttcaaggaactcaaagatattttcccgtccggcatcgtccatctgggcggggatgaagcacccctggaaaaaacctgggccaaatgccccctcagcatccagtaccgggagcaaaaaggcatgaaggacgtccacgaggaattgaaggaattcaccaaaaaaatgtcctccatgctggctggtcacggcaagcgcatccaactatggtatgaaaaaccgtgggccagggccaacatctacaacaaaggagacaccgtcttcacctggcgcatgggactgacaccgtccaccatcacggagacgaaaaagcaggggctctccctgatcattgctgccggggaacactgctacctggactatccgcaacttccagggcaaagcaaccggggatggatgcccaccaccacgctggagcaaagctacaggctggaccccgcctacggcagaccagaaaaggaaacaaaccatatcaccggcgttcagggcaccgtgtggggagaacatctccctaccctgaaccacattctctaccgcgcctatccgcgtgcctgcgccattgcggaagctggctggtcaccgatgagcgtgcgctcctgggaaaacttccggcgcaagctggccgaccaccgtcaattcatcctcaaacgcttcaattatgatatggagcgcaccaaagaaaacgaaccgcctttcaaataatccgcactctcttttcccatgagcaacatcaaatttgcacgtccgcaccgcccttccgtagaagaactggcccagggagtactggccggaaaccgcgccctgctgggaagggccattacactgatagaaagcaatgccgtccgggaccaggaatcttcccgcgccctcatctccaggctccttccccattcgggcaacgccgtccgcatcggcattacgggcgttccgggcgccgggaaatcctctttcattgaagccttcggcacttacctgtgcaaaaaagggttcaaggtggctgtgctggctattgacccgtcttcttcagtctcccgcggttccattatgggagacaaaacacgcatggaggaactctccggagaggaaaacgccttcatccgcccttccccctccggcggctctttgggcggcgtagcccggaaaacgcgtgaaaccatgattgcatgcgaagctgcgggctttgacattattctcattgaaaccgtgggagtcggccagtcggaaactacggtgcgctccatggtggacattttcatgctcctgctcatcaccggagccggggacgatctccagggcatcaagcggggcatcatggaactggcggatatcctggtagttaccaaggatgacggcgacaaccgccagcgcgccgcagcccactgccaggaactgaaaatggtactccactacctgcaaagccccactcccggctggacgccctccgtcctcacctgttcctccctggagggacgcggcctggacaccattgaagagacgctcttccgcttccgggacagcatgaagaaatccggattctggtacagccgccgccggagccagtccctttcatgggtccagtccctggtgcatgaagccctgctcaccgcttttgaacagcaccccgccgtagcgtcccgcatgcccattctggaaaacatggtggcgggggacaaaatggaccccgtttccgccgcacatgacctgctgagccacttcacttatcccgcgcccggacattaaagaaatcttccagcaccctggcgtaaactttctttttaaactccggcagccactccagcttaaattcggctggggctatccatttgtagtcgcaaaactcccggtcatccaggacgggttctggagcatccgcatgcagccgacacaggaaatactcctgcgcctgcccaacaaaaggctgccgccgcttttcacgaacatactccagcacctccggcggataatcgtaacgatacccctgccgggattccacaatatcatactgggacggcaaaaaacccacttcctccccaatctcgcgccgcacggcttccaaagccgtttcccccgggtcaattccgccctggggaaactgccaggctcctttctgcccggaacgctcgcaaatcaacaatttcccgtcctgccggaccatcatccccgcaacattcggacgatacaatctttccatgccctgttcattaacatacccttttccgcatttccagccatgttccttccataaacccgttgaaaacgggcaaaaaaatccttttacagattttcccccctacttcaaggcacaccgaatatcaaccgccttccaccagaagaataagcggtataaaaaaacgaaaaacttcccgtttgcggcaggaattccggccaatcagctaaaaactttagtaatcagatattaacatactgccatttttcgaacattgttctttattggcaagtctattgttcctgcaaagtaaaatatgggaaccggccttccttttacttttcacgcgttccgttaataaaactccgatcatgaaaacaaaaatgaactacttgacagccacgcttctggcaatatttgcatggggcggtacaggcgtcggtatggcaaaacaatccaaaaaggcgctaaggcatcccgttgaagacaacaaaaaatctcccggagtttacgatgcgaatcaaaatgaccgtcaaggcattcaagatgcggaacaaggccccggggacaaaccggttacgtggagcatttcccgtcccaatgccaaaaacgcgctgtctgaagtcacaaaaggaatttaccagattcacggcggaggttttccgaacataactattattgaaggacgggaaggcatcatgatcattgcccctttcgtcccgaaagaaaccatggccgagagtcttgacctctattaccggaaggcgggaaaacggccgatcaaggctgttgtagatgcacatccacataccaactattttgccagtaccaaaagaacggcatccgggctggacatagacggcatagaaatggaattcatggcggttcccggaatgggggcctcttctgccgcactgatgtattttccccaattcaaggcgcttttttatggagaggacacggcaagcgccatacatgatatctgcactctgggagtatccaaaataagggatgcaaaaaacaggtggaaagcccttgatcaagctattcagcgttatgaagacaaaatagagattttattctcacaacaccattggcccagaataggaaaagaaaatatcaaacggttcctggccagggaatgccgcaactgcaaatacatgcatgaccggatattgaacctggttagcaaagggtattcccccgcagaaattgagggaataatcaatccgattccggaaagcggcagaatcaggaatagccctccggaaataaccgggcaaaaggactatcgtcaagacgccgggacattaaggaacgttatgtctgcccatctaaaaagaggaaacataaggaatctggtaagaaagatgtggaaacagttcagttatcaaacggaatccgtattccggaacgatgaacttctcgtcaatgccggagaaccgggaatcgggctgcttaaaaactcccgcgaactcacgttgacggacactttatatgccctgactccggaactgctgttcgactatttgggcgtcagcctgaatagtgagaaatccaaagggaaaaaactggctttcaactggattgcccaaaacggaagatcatacggcttctggattgaaaacgaagtgctgatgtaccgcgaaggaaaactggtcaaacatcccgacgcagtcatcaccggagacaggctccacttcgccctggtcgccatgcgggcaatgcccttaaagacagctctggacaaaggcatgattaaaattgaaggcaatacggataaattcagggaattgctcggatgcatggataagttccatggaaatttccatgccataaccccctgattccattacctttttacgtacgtttcaggtttttcatccggaaacaggagtattggcattttctatcaatatcatgaactgtgccagtaaatattattcaaacagtcatgtattccggcgcaagggagcaactgaaaaaagggatgacatttatccatgaacagacatgttctcccccgcaaacattcaacgatttttcctttccatacagtaagagctgatattaaatagaaagcatgaaacgattctgccttcctgttttagctctatttgtttgtgcagccgcacctctttccgcccagtccaagaaaggagccgccgtcccgtccacggatgactacaaccagagccagttctggataggcaattttccggaggggcagtatgtggtgcatctcagccggattgtagcggtggcgcagcacaggtatattctggacaatgcctgcatggtgtatgaagtaacgctgattaccctggggaatacgcccaccaagttttattatctggaaacgctgggtcaaaattccggtatcaacgccatcaagaatgtgactgaccgtgcgaaggagcttggggctggcgccgtcaaccgggcaacgggaggcagcattgacccggatacaaccgtcgcaaaagcttacccgaatacgaataccgtggaattccgtgtagctaccctggagcagctcaacaaaatgtatgcttcccttctcaaggcgtggcaggacggaaaagggaggacgttcaggccctgacggcttgaatcagtaattagagaacagcgccgggcggtcagatttcaatccgcgggctgcaagtacggtttttacactcatctctcatcactgctaaatgtatttcctctccatcatgtgggccttcaaagggtccgcagaaaagaggtgggtgaggccgatcgccagggcgtcggaggcatcggattccggcgtttcccggagttccaaaagagcccgcaccatgaaggcgacctgcgttttttgagcggccccgcgccctacgacggagagcttcacgcttttgggggaatattccataatacgcagcccggcttccgccgcggcaatgaccacggccgccttggccgcacccatcgtgatggccgtctgatgagactggacatagatgatgcgctccaccgccatttcatccgggttccatttgtcaatgagattgcccaaatgctgcttgatggcaagcaggcagccggactgggacacgctccggggaatggatagcgttccatagtccagcgcgcgcgcgcgccggtaatccccctccaccacggcataacccgtgttgcggatggccgggtctatggcaagaatgcgcatgggatgatcttcattccatcagagagaaacatcatgttttcccccctccttagcgcctgcggcgcttgggacctgcgggtttgggcttgcggacggatttgacgggcttgtcttccaacagggcggtgtacgtgtagttgaacccgtccagttttttgcgttcaatgggtttcccaatgaaattttccacagccgcagcaaaatccagctcatccgccgtcatgatcgtgaacgcatccccggaagcttccgcgcggccggtacggccgatgcggtgcacatagtcttccgcgttttccggaacgcggtagttgatgacgtgggtcacaccgctgatgtcaatgccgcgcgccgccacatccgtagccaccagaatatcatattttccgctcttgaatcccttaagcgcctccatgcgttccttctggggaatgtcggagtgcatgacggccacctccccgcggtagccatgatgcttgagcatgccgcataccgcgtccgcctccttgcgggtgcgggtgaaaatcatgacggaacggaagtccgtccccttgagcagggccaacagcagttcatcccgctggtccagagctaccggataaaaggcatggctgatggtggcggccacttcacgccgggcgatggtaacttccgcagggtccgtcaggcaccatttggcaaatcccgcgatgaccggaggcatggtggcggagaagaagagggtttgccttccttcccacggacaaaggttgacgattttacggacaatgggcaggaaccccatgtccagcattcggtccacttcatccagaaccagggccttgacttctccgaagcgcatggtgcagcggtagaagtggtccaccagcttaccgggagtggccacaacgatgtccgccccttttttcaggtcttccgtctgctttccgtaccccacgccgccatacagcaacgctactttcaacccggtgaatttaccgtattcggcaaaggattccgccacctggtcggccagttccctggtgggttccagcaccagtatctgaggtttgccgatgggctgaatccttgtcagcagcgggagggcgaaagcagcggttttccccgtccccgtctgggaggccccaatgaggtccctgccttccagaatgatgggaatggcctgctcctgaatgggggtgggatgttcataaccgcatttctccaccgccttcaagacgggttccgataaacctaattctgaaaataacattgatcttgtatgcttgctaaagagtagaacacgattccgtacagcggcgcgggaatcgcggtcaggagatgaacggattggtcagcagttcgtttttcacgttggtatatggaccgtggcccgggaaaatcatggtcgtggcgggctggttgagcactttcttttcaatgccctgtttcagcaggcgcaggtttcctcccgggagatccgtccgcccgatggagcaagcaaaaatgacgtcacctgtgaacatgattccttcatccggcaaatcgtaaacaatgctgtccggagaatggccgggcacctggtggagatgccacaacaggccgccccaattcgccgtgtgaatgtccggagtaagtatttcatccaccacaaacggctgaacattgaggggaagcccccaggcgtcgcgggccattttttccagcgtcaggctttcattgtaaggttgcccggcatgaatgcggcagtcgaaaatctggcgcatgcggcaggcatcctccacatggtcaaaatgctggtgggtgatgagaagatccgtgatgatgatatcgggctttttggaatagatccagtccgcaaagccggacggagcgtccaccgccacgtaagcgttatccctcgtcttaaagaggtaaccattacaggaagctactccacccgtataaacgcgaatccgatccatgggcagggattgtagtgagattgcccggaatatccagtataaagacggttcccttaaatagctttctgtcatctccccctggaaaagccccttatatcagtctccagggaatggtgcatccggcatccatcggcaccactttctgtccatgcccttcataagcgtccggcaccagcatttcacgccgctgcagacggaccgtcctggcaggcggattcaacccgtacaaagcgcaggcatgaccggaaacaaagccctgcaaccggtccaggaccccgtgttcgtcaaacagggccgccagacgaggaagagcgatgggggcggtaaatacgccggcggcgcatccgcacgcttccttggcatggatgggatggggggcggagtcactgccgaacatgaggcggggatgcccggaaagggcagcctgcaacagggcttcccggtcttccggccttttggcgatcggcttgcagaacagatgcggcctcagcatgccaccggccacatcgtccaaagtaatgagaagatgctggagggttaccgtggcggccaggttttcaaattcgtccagcagctgcacggcggcggccgtggtaatatgttccatgcagatagtcagccgggggaagcgcgtagccaaatcacggtaaacatccaggaattcggcctcccggtccatcacgaagccgtggctttcgccatgcaccagcaaaggaatatccatttcctgcatgatggacagggtagcttccgcatccttcatggccttcacgccgccctcgctgttcgtggtggctcctgccgggtacagcttgatgccgaacaccagttccttgagccgggacaattccttttctgaataggagcgaaaaaatgccgtcatgtacggctggaatacatcgtctccgcaagcgtccagcacccgctgccggtaagcctgcaccgcacccgcatcagccaccggaggcaccaggttgggcatgatgaccgccccggcaaaagaggcggaacttaacggagcgaccagcttcatcatatcgccgtccctcaggtgaagatgcatgtccagcggggagtgcagttccagaatcatgccgacatcatgagggaagattgcgcctaaatcaagcacgctcccccgccctgcaggaaagcaattctccaacgggcagggaaaacgggcattttcccgcaaaccggaagggatgcggtactctttgctgctgttgcgacaaggcaaaatcgcctggaaacgaatcgtaaaagcaaattctgtcccaatgcctcagaaaaacgctgttctcccggacggctttcttgaaacagcagacggaatgcaggaacagtaaaagtccgaatgaaaaaaagccgcccggaggcggctgtttttcctgaacaaggtggcgaagcggacggggctcgaacccgcgacctccagcgtgacaggctggcgctctaaccgaactgagctaccgctccataaccttggatgccgtccctgccttgcagcggggacgtggaggcttatacacgcctttataccccggtgacaagaaaaaaagactttttttgcaacttctgcaaccgtcggcggtttgtacggtgaagaaaccgtaacttttcagttacccgatttatttcaatacagcaataacttctcaactttatttgttttagtttgacaacaattaaccggttttgacataacacccccatgctccagactgccgcggatatcacagcctccgttcacaaattcgagacgatccttcaccagttcaaaagggataacctgaatgaggtggaccagagccattaccagaaaatcatggggctttccgtccggcagatgaacgccctgggtgccctgaaccacctgatgaccaaccgccaggaaggcattcccctgaaagagcttgcccattatctccgcatgagcattccctccacctccctgctggtggacagcatggtgaagaaaggcctgttcgaccgcaaggagaatccccgcgacaggcgttccctgtgcatccgcctttccgaggaaggcgaatccaggttccagatgcttttcaacggcatgaaggaaaaactggataccctgttcagcactctgtcgcaagaggacaaggagaatttctgccgtattgtggatactctttacaaccacgtttacagtaaataataccatatgaaaaaacacacgcatcatcggaaggcgcccctctgcctgctggccggttccggcctgcttttttccctgtttgttccgggttattcccaaggaacgccgggaggggctgcagccaaacccagtaccgtactcgtccagaaagccgccgctattgacagcgcggtgaacaagaagtacatcggccaggtggaagccattgaccgggtgactgtgcagccccgcgtctccggcaacatcgtagccacccgtttccgggaaggaaaggtcgtgaagaagggggatctcctgttcgaaattgaggatacgcgctacagggcggctgtggaggaagcggtagccaaaaaggcccagcttgaagccaaactgctttacgcaaaaaatagttttgaacgctataacagactgctggcctccaaatccgtctccatggacacggtggaaaacgccaagagcaccatgcatgccctggaagcggaaatccagtccgcaaacgccgccattacggtagcgaaggacgatcttaactataccaggctcacggctcccatcacgggccgcacaggccgcgtcaccttttccacgggcaattacatcacccccacctccggttccctggtgaccattacaggcatcgatgaagtgtacgtgaagttccctatcagtgaacgcgatttcctttccctgttcggtacccaggaaaatatgaagaaagacgcccttgtgtccgtcaacctcgccaacggcaaggcatacgaccagccgggcaggattttcatgacggacaataccgtccagacgaccacggacaccctgaatgtctgggcaaaattccccaatccggaagacgtgctgacacccggcggcgtagtcacggttaatctttccaagaaaaacgtggaccgcttcccggctgccaacatttcctccgtgatgcacgatgcctacaagagctacgtttacatcgtcaacgaccagggcgtcgtggaacgccgggacgttacgctgggcaacacggtcaataatgaacagtgtttcagttccggcgttaaggaaggggaagtcgtcatcatcgacggcatgcacaaggtgcgtcccggcgccaaggtgaatccggtatattccgttcaaaattgagctacccatgattgcggacctgtttatcaaacgccccaaattcgccatcgtcatcgccatcctgatgatgctggctggcggcatctgcctgaaccagctccccattgcggagtatccggaaatcgcgcccaccagcatcaacgtgcaggccacctatacgggtgccagcgcccaggtggtgatggaaacgctggcctcccccattgaggaagaactaaacgggttggaaaacctgctctatttttcctccaagtcagataacaccggcgggtattccctgtccctgacgttcaagagcggcacgaattcggacatcaacatggtgaacgttcagaacgccttgaaacgggtggaatacaaacttcccaaggaggtgacggaccagggcatcaagatcaagaaacgctcctctgacatcctgggattcttcgctttccggtccaccagcatgagttccctggagctgaacaacttcgtcaagaccagggtgaaggatgaggttgcccgcgtaccgggaatctctgccgtcaacctgatgccggaaaagaattacagcatgcgcatctggctggacgccctgcgcatgtccgccctgaatatcacgccggatgacgtttccaatgccatcaaggcgcagaacgttcaggccgcggctagctccatcggctcggaaggggaaaacaacttcatccaatacaaggtgaacgtcaccggacgactgcagaccgtggaggaattcagcaagattatcgtccgcacgggccaggatggccacgttacccggctggacgacattgcccgcattgagctgggcgcggaaacctacacgggcagcagccgcaacaacggggaagactccgtgaacatggctgtgtaccgcctggatgacgccaatgccctggaagccatgaacggcgtgaaagacacgctggagaagctggaaaaacgttttccggaaggtgtgagctacgtcgtgagctacgaccccacgcaatacatttccgccaccatggcggaaatcgtggaaacgcttgtcatcgccctgattctggtggtgggcatcacgtacctgttcctgcaggactggcgtgccacgctcattccggcgctcgccattcccgtctccctgataggcaccttcgccatactgctgcccctgggcttttccatcaatgtgctgaccatgttcggccttattctggtaatcgggtccctggtggacgacggcatcatcgtagtggaaaatacgatgcgcattctggagacggaggatctctcgccggaagaagccaccaagaagagcatgcaccagattacaggcgccatcatcgccaccacgctggtgacggtcgccatttacgtgcccatcgccttcttcggcggcatggtagggaacatttacatgcaattctccgtaaccatgtgcgtggccctctgcctttccgccatcaattccctgacgctcagccccgcgctgtgcgttctgctgctgaaaaggaagcaaaagaaacagagcaggttcagcctcttccgccccttcaatgtctctctggaatgggcgcgcaaaagctatatcaaatgcgcaagcatcatggtgcgccgcgcgtggcttacgctgattctgctggccgctgtcctggtcggcaactggaaactgtttgagaccgtacccaaatccttccttcctccggaagacaagggcaccgttttctgtgatatccagctggcccctggcgccacgctgggccgtacggaacaggccatgcgcagtgcggaacagaagctgatgagcatccccggcgtgcgccaggtttcctccacttccggattcagcttcatgggcggcaacggggaaaacctgggcatgtgcattgcccagcttgacccctgggacaaacgcaagacgccggagctttccctggattccatcatgcagaaagcttccatcctgtgtgatgaaattccggcggccaaggccaccgtgttcagcccgcccgccatcatggggctgggcctgacgggcggcgtctccttcatgctccaggccagcggggaggaaactcccaaggacctggaacgagtgaccaacgacctgctggacaaaatcaacaaactgccgggaaccatgtacgcccgcagcgcgtatgaggcgaacaccccccagcttttcctgaacatcgaccgtgaaaaggcgcagagcatgcacgtgcccgtcagccgcatcttcacgacgcttcaaagcaagctggcctccatgtacatcaatgatttcaacctgatcggctacacgttcaaggtgaagatgcagtccgcggcagaggaccgcaccaccatcaatgacatcatgaacacctacattcagaacgatcagggccagatggtgcctctcagctccgtagccaccctgtcttacatggtggggccgcggcaaatatcccgtttcaaccagctcatgtccgcagaagtgaccgcccaggcaaaacccggcgtcagcagcggcgagctgatgaaccagattgaggctattccgctgccggaaaattactccatcacctggacggacatgagctatcaggaacggcagaacgatgggaaaatcgtcctgctgatgggtatggccctgctcttcggctacctgttcctggtggcgcaatatgaaagctggacggtgcccatttccgtcattgtctccgtctccgtcgccctgttgggcgctttgctcggcctgattatctgcaacacgcccctgagcatttacgctcagctcggcctggtgatgctggtgggcctggccgggaaaaacgctattctgatggtggagttctccaaaatggagcgggagcgcggcgttcccatccaggaagccgccctggaaggagcccggcagcgcttccgcgccgtgatgatgacggccatttccttcatcatcggggtattccccatggtcatcgcctccggagcgggcgcggcaagccgcaaagccattggcatctccaccttctacggcatgattctcgcaacagtagtgggcattctgttcattccggccctgtacgccatgttccagcgttaccgcgaatgggtgaaaggcctgtttgccagaaaggcggaataaatgtaaaggaaaactgctccatgaaggacggggcggccctggccgccccgtctttttcttttttatgcttcagcgcctcccgcggagttacggacaagagcggctatttgacctgctcgtacaaatacaggtcaaaatcttcaaaatgttccttcaggacggcacgctccagccggttctcaaatggaggaagaaaagtatccgccggatattccccctttactttggaaacccacatgcgggacatggccggcatcatcagggaaaaaatctccgcacccccgatcaccatgatttccgggtccatcaattccagacattccaactcccctgcggaatgaaccacctgaacgccttccgccgtccacgccgggtcacgggtcagcacgatgttctgcctgccgggaagaggcctgcctatgctctcatacgttttccggcccatcagcacggggtgccccgtcgtaatgcgcttgaacgtcttgaggtcgtccggcaaatgccaggggagcgccccccggtaaccaatgccgcggtcgggagccatggcgaccactcctgtataagtaacgggttgtgacatgatggattaagggatgaatgttctaaacggagatgggagccttgatgtgcggcaggggatcataccccacgagctcaaaatcctcataatggaatccgtcaatggtttttacctccggattgagcttcatgaccgggagaggacggggcgtgcgggagagttgttccctcgcctggtccagatggttccggtacaggtgcaaatccccgaacgtatggatgaattcccgggcttcatacccgcatacctgggcggtcataagcaacagcagcgcataggaagcaatgttgaagggaacccccagaaaaagatccgcgctgcgctggtaaagctggagggaaaggccgtgcttttcttctcccggctgggcgggaatcacgcaaaactggaacagggaatggcacggagggagggccatgtcatccaccagggccacattccacgcactgacgatgtgcctccgagaccatggattgtgtttcaggccgtcaaccagtctggcaatctggtcaatgggtttgccgtcgtttcccggccagcagcgccactgcgcgccgtacacgggccccagatccccgttttcgtcggcccattcatcccagatgctgacgccgttgtctttcaaaaacttgatattggtctctcctttcaggaaccagagcagctcataaatgatggagcgtaaatgaagcttcttggtggtaagacatggaaaaccgtcgcgcaaatcatacctgctctgccgcccgaacacgccgatagtgcccgttccggtacggtcctcccgccccgctccattgctcaggacatcctccaaaagtgccaaatactgcttcattcccttaaattacgcttttctaatccctggacccgtgataatacgagcatgcgtcaccttagtatcatctcctgctccaaaagccagccttttcacttctccccgccgttttcatcccccgcatcttttccggttttccgttccatgatcattcctgaagagccatatttgggatttgccgccttttgccacattgcaggcgccttctgcctgattccggccctgctccatacgcgtacgcctcagggaacaatcgcgtggctcatttccctgctggcatttccatatattgccgttcccttttacctgatcctgggacgccggagattcagcggatatgtggaaacgcgccgccgccagacggaccccgaatccgcatggggggaactgacggataaaattacaaactgcatggttccgtatgccgtacagtcatccgacacggcgggaaaaatcatgcacacgctttccaatatcgtgcggctgcccgtctgccgcggcaattcctgccgcctgcttattgacgcggccaacgctttcccgcgcatctacgacgccatcaagaacgcagagcattacatcctgattgaattcttcatcatcaaaaacgactccgtggggcagaacctgaaggacctgctgattgaacgggccagggcaagcatccgcatttacatgctgtatgatgaaatcggctcccacaagctcccccccggttacatttccgccctgcggaaagcaggagtgaacattgaacctttcaacgggaagcgccatttcctgagcaacatcctgcggctgaacttccgcaaccaccggaaactggtggtggtggacggttccaccgccttcatcggaggcatgaatataggcagggaatacctgggcaagggagctctgggctactggcgcgacacgtttgttcagcttgaaggcccctccgtccagcaaacgcaaatcagctttctggaagactggaactgggccatgctgaaatgcggcccctcctcccttccccgcctccgctgggaaatcacgccccagccggaggatgaaaccctgctcatcctgccctccggccccgcagacgtcattcccgcctggaaaaccgcgctcatcgccctggcgaacagcgccacccggcggctctggatatccaccccctacttcgtcccggacgagggagtcatggccgccctgcaggcggcggccctgcggaacgtggatgtgcgcatcctgcgtccggagcgggcggaccatattctggtgaaactgtcctcctttactttccttcgggacctggacacatacggcatccagctctgggcctatcaaaaggggttcctgcatcagaaagtagttctgatggacgatgacatagccaccgtgggaaccgccaatctggacaaccgttccctggccctgaactttgaaatcaccgccgttatccattccccctccgcctgcgcggaggtaaaagccatgctggagcaggatttttcctcctccaagaaggaatccctggcggattacaacaacaaatccctgggcttcaaaatgctctgcaacctggcgcgactgacggcccccgtccagtagttcttccggcgaatccgctgttgtatgcttgacctgcaagggaggctgtgagaaaatcaccctccagaagccacctcttcaatttttaacaacagttaactaaataatgaatcctgttacattcaattgcaccgttctgcgcgacgggcatcaatccctggcggcaacccgcatgaagacggcagacatgctgcccatcgcccccattctggactccatgggcttcagcgccctggaaacctggggcggcgccaccatcgacgccgggctgcgcttcttgaaagaatggcctttcgaccggctggacgccctgaaaaaagcggcccccaagacgccgcacatgatgctgctgcgcggtcagaatatcgtgggctacaccaactatgcggacgacgtggtggaagcctttgtcgccatgagcgccaagcacggcatgaacatcttccgcattttcgactgcgtgaacgacccgcgcaacatggaaacctccatccgcgccgccaagaaagccggagctcaggcccacggcaccatctgctacacgacttctcccgtgcacaccacgcagacttttgtggacatggggcgggaactcgcggatatgggagcggacgccatcgtcatcaaggatatggccggcctcattcctccgtatgtcacccaggaactggtcagcgccctgaagaaagacctgaacatccccgtctggatccacacgcatgacactgccggcctcggcgcctccacctacctcagcgccattgatgccggagtggacgcgtgcgatgtctccatctcccccttcgccaacggcacgggccagccggactgcctgcgcatgcttgccctgctgaacggcaatccccgcaagccggattacgacgcggacaagctcattgaagtttccgaaatgctcaaacccgtctatgaaggtctgggcaaattcgcctcccaccgcaacgaagtggtggactccgacacgctccgctaccaggtccccggcggcatgctttccaacttccgcacccagctcaaggaacagggcatggaagacaaatttgaggaagtattcgcggaaatcccggtagtccgcaaggccttgggctggattccgctggtgacccccacctcccagatcgtaggcgtgcaggcgatgctgaacgtcaagttcggccgttggaagaacatcaccccccaggcggcggacattgccctgggctactacggccgcacctcggctcccgtggacccggaagtgcagaaactctgcgcggaaaagatgggcaaggacccgatcacctgccgtccggcggacctgatcaagcccggcatggaagacctgcgcaagaagcttgcggaaaaggggctccccacggacgacgaacactgcgtcatctacgccatgttcccgcagcaggtggaagacttctacaaaaagccggaacctaaggaagaagcccccgtacaggtaaacaccgctcctgccgcaacgcctgcgtctgccgcgccgtccatgaccgtcattgacaacggaatcaccgcccgggtaagcggcccttccggttcccgtgacctgaccatcatcatcaacggccaggcccactccgtgaaagtggaacgcatcggctaaaatctccgaagcatctgctcaaaccgtttgcgggcggttcccttcatggaggggaccgcccgctttgccatttacggattcctgaaaatccatccgctgcggcgctcaactacctggtaaaaaccagcatctttccagccaatttccggttgagggcagttgccggaattttcttgacggaaccaggcttgagctgatggatttcccccagggaatcaaccgccgttgcgctctgttccgagtcacaggaataatactccaggtcagtactgtccttgtctttgccccaccaggattccagcacgtcctgaatggcgttattgctggtccgtaaaacatccaagtcaaataggaatttcgcgccccaatggcaggtgtccgccaattttctggacgcatgggccacattcttctgcacaacacaccaatgagcgtgaattcctgaatgatcgggtttgccagaggcatccacgcaaaaaggaaccatgcagaggcctccgccattcagcgtttcaatgatggaagtgacgtcacaggcaacagactgacacttgattttggacgggtcaagcgccttgatataatcagccatgcttgaagtagcgtcatataattctccaataacggttcttccgtcctttttgaacttgtttctcagggattccctggtcttgtccccgtctgccgtggcggggattttaatatcataaagatattccaggacaaaggacaaggcgtagagaccgcaggtcggcccccgctggtccttgaattcaacgttccggccttccggattggtaactgtaatagacataattcaataatgatggcgtggggattcatttcccgcacgccatcatcacatcaccggaacgcgcttgacgcacgctccgccatgcctccggccatgtttactttccggaacatcgcattcctcctctcggaagggaaatgcttaggaaacttaattctccctgaaagtcgcccttttaatatcgggaatgaagaagatgaaagttattcccccgcctgcctcatcagggaaaattcccgcctggtagtgcgccttacgcgccagagcagcagcaccgccgctactgccaggccgatgatgaatcccgtccagatgccccgcgctcccatggccgggacaatccagtccgtacgggcaaggatgtagcacgccggaaatcctaccatccaataagagaaaaacgtaatgaaggtaatggacgccgtgtcccggaatcctctcagaaccccgacggaaagcacctgcaaacagtccggaagctggtaggccgccgccagaaccagcaggacggaagccgtgctgacaatcagctccgagtcattgtacaggtgcacgatctgctcgcggaacagggtgatgcctccaaaggtgcacagacagatggtgagcaccagcacgtaggaagacagaatggcggatctggtgcctgccaggtcattccttccgtgatggtacgccacgcggatggaagccgccagccctacggagagcgggagcatgaacaccaggccgcccacgttcccggcaatctggtggctagccacctgcgtctctcccagcggagccagcaccagagccgccgcgcagaagagcatcacctcgcacagctgggaaacgcctataggcacgcccagccgcaccaggtgcgtgatgacggaaggcgtaggccgccgccaggaaatgatgtgcctacggtacggcctgtgcttgggattgaagtaaaccagcaggaacatcagcaggaattcaatgtagaaaatgactgccgtggccgcgccgcaccccgctccgcccatgcggggaaaaccgtacatgccgaagacgaacatgtagttcaggggaatgttgagcaacaggccgcacaatcccacgtacatggcgggacgtgtcatgttggagccttcgttcaggctcttcagggccacgaagcccaggttggcgggaaggccccacataatggcgaacatgtaggcggaggccatctggcacatggcggcgtcatcggaaatccagccgaacacatttctcagcacataaatgaccggcatggaaaccagactgagcatgaacgccagccacaggccgtggttggtcatgtagcccacgcggctttcatggcttttcccccgcatgttggcaattacggggccgatgatcatcaacacgccgcaggcgaagagagccacgggcaggtacacggaagaccctagggccacggcggccatgtccgtcacgccggcgcgcccggccacaatagcgtccaccgcccccatgcccacaatggagaggttgaccaccagcaccggaagggccagcggtatcaactttttcatttccttcaaattccacgtcttattcattttttttattcccttccatgcatcctcactcaaaaagccggaacatgccggcaaacaagccggaccagagcggcaggctccaatccggctttaaagttaaaggttgccaaccgtaccgggcctcccgccccgtccgggcattcagcggtcaagcaccacacgggcgcattgttcagccacctggcggaacgcggcggaaaccggattctgcccgggctcttccagggccacggggcggccttcgtccccgccggagcgggtggaaatatccagcggaatcttgccgagcaggggcactcccagcttggccgcttcccgttcgccgcctccttcgccaaagatatggtaaatcttgccgtcagagggacactggaaataactcatgttttcaattatgcccagaatgggggtttccacccgttcaaagaggccgatcgccttgcgggcgtcaatcagcgccacttcctgcggggtggtcaccaccaccacgccgtccagttcggccgtttggacaatagtcagctgaatgtctccggtgccgggaggcaggtccagaatcagaaaatccacatccccccatgccacgttgcgcaggaactgctggacgtagcgtgtcgccaggggaccgcgcaccgccacaggatcggattcattaatcagcagccccatggaaagaagtttcacgccatgggccgttaccgggataaattcgtcattctcattggctccggggcgttccttggtgccgaacatcagggacatggaagggccgtaaatatccaggtccaccagaccgacggaataccccagcttgctcagagccaccgccaggttcgcggaaacggtggatttgcccacgccgcccttgccggaagccacggcaatgacatgcttggctccgggaacggaggatttccaggtagaggggtcgtcattgattcccttcctggcttccggagccttatgctcgatattgacgtcacaatgcttcacgccgggcaaatgtttcatcacgccgtgaacgccttcaaaaatgtaacggggaatatccgcattcttgctctcaatcactaaatcaatcgtgacgttgttttcagcgtcaatgtcaatctttttcaccagcccgaaagatacgatatcgcggctgaaccccggaaattttaccgtggtcagcgcagcccgtatcaattccggagtcaattcctgttgtgtcgtcatatatctgaaatattcatggttgcatcaatattccggccccgtgcctccggcatgcagaatgctccggaatatgaaaaaaggggacggcaaaaccgggaagcaaaaatactcccttttttatttttgacaacgcctaattcagacaaaacggctttttgcccgccggatttgcaatgccccggatactaagaaatggcgggacggccgcagccccgctattggtgaaataaaaaacaggagggagggggaaaatttattccccctgctgcttcagtgtctcccggatatcctggagagcggcgatgaaatcatccaaaatttccgcgggcaccataatccggtcccggttggagctcaccttttccgtaatacgcaccactttgccgcgcgcattctgtttaagatcaagaaagaacgtcttgcgttccgcaatgattttttctgtacaaataatatcgtcctccacggctgtaatctacctctggttaaatgaggatttcaggataaagcttccccgctggcgggtcaatgttttatttaccccggcagatgcggccgggaagcaaaaaccggaaaaataacggtatttttccggcagggcatccgttctccgggcaaaccggcagcaatccggcgtcccggcgttaactgcggcaacgtgattgaccaacatgaatggagaacaggaaagaacaccgtcgcccgggcctgttcacgaagctcattgatcttcttcctgttcattttgagccattcaaccggcaggaggaactttttccgcccttcggcttccggcccgccccacgcaagggaacgggaagaaaatggaaaagccatgaggaccgcccacgtcccccggaaaggaacgccgcccatcagcattccgcacgccatctggcctgctccgtcttgtagagcttgtacgtgacggcgtccgccagggcttccaggctggcctcaataatgttgtaggaaacgcccacggtggtccaggtggcgacgccgtccgaggactcaataagcacgcggacattggagccggtgccgttttcatcctccgcctccggaatgttcgtccgggtgggggaaagcacgcgtaccttgtagtcgatgaggtgcatctgctccaattccggataccagcgcgtcagggcgcggcgcagagccctgtccagcgcatgcacggggccaaagcccccggcggcggtgtgctccacattgccgtggacatccagcttgagggaggcttccaccatcatgtccgggtccatttcatggcgtgaggtcagcaccacagtgcgcaggatggtgaaatacggtttcaaggcattgtccggcatgtgccgcaggaagagcagctccgcgctggccggggcggccacgtaatcataccccagagcggcatttttcttcacggcagaggaaagcacgtccagaagggggtctcccttttccagttcaaaacccagggtgcgggacagggaaaggatgttgctcctgccgccctgctccgtcatcagcacgcgctgggcgttccccaccagggaggggtcgatgtgctcgtacaaagcggcttccttcatgatcgcgctgacatgcactccgcccttgtgggcgaaagcggcgttccccacgaagggctgccgccggaaaggcgccagattggatacttccgagacaaaggcggcagtggatttgagccgcgtcagggaggcgccgctgaggcaggaaaagcctttcatcttcacctggaggttggggatgacggaacaaagattggcatttccgcaacgctccccgatgccgtttacggtcccctgcacctggatggctccgctgtttaccgcggccaggctgttggcgacggccagttcacagtcattgtgggcgtggatgcccagaagggcatgcggcaggcgttccctgaccgtcctgataatggagctgatttcctccggcatggtgcctccgttggtatcgcacagcaccaggcagtccgctccatgttcccaggctgtccggagcactgccagggcgtattccggatcccgcttgaagccgtcaaaaaagtgttctgcgtcaaaaaaggcttcttccatatttttcttaaggaaggaaatggaattgccgatgatttccagattgcgttcccgggaaatgcccagggccacttccacatggcgggggcaggatttcccaaaaaccgcggccacccgcgcaccgctggatatcagggcggtcagcgtggggtccgtctccggagtatgggaagggtggtgcgtgcttccaaaggcggccagctttgcattccttagtccgacacctctcatggcgttgaaaaattccgtttccaccggattggcgccgggccagccgccctcaatgtaatccatgcccagataatccagctggcgggcgatgcggaccttgtccgtcgcgctcaaattgacgtcttcactctgcgcgccgtcccgcaacgtagtatcatagagaaagattttggtggacatccccttgattcatacatgcaaacgggaagccgttcaagaccgggccccggcttttcccctgatgcagacacgaaaagcgcaaggcttgaaggagaaatcggcttccggtaggatggccgccatgagtttactcaggcagtctcttcatctctttttcctcttcttctccgtggcccttccctccccggcggccacttccgcccaccctttcctggacagggagcgtcccatccgctggagctggctgacccaggacaagctggaaccggatattcaggaagccatgcgcctcacccggacagccatagaggaaatcagccgcctccgtccggaagaaatgacgtatgaaaatacgttcggagcgctggagaaaagcaatgacctccttacggaaggcatgtgcaaggcttatgtcctgaaaagcctgtgcgacagcggggaacttcgcaaggccatggattcggtcgctccccgcgtgtccgccttcctttcctccgtcacgaaagaccaggccctgtggaaagtcctgaaaaccgcggaggaacgcctgcggcaaactcacctgagccccgaacaggaacggtacatggagctaagcatgcagagcttccgggataacggcgctgatctgccgccggacaagcgcgcacggcttgagtccattgacagggaactgacgctcgcctcccagcgtttcaacaatttgtatatggatgccaggaaatcctggacctggacggtgcgaaacgccgcccttctggaagggatagacggaagcgccctgcaacaggcgcgtgaagaatttctgaagcgccatcccgtccagtccggtccgggctggacgttcacgcttgattccgcggcttccgcccgggtcatggaaaaagcccgaagggaagaatgccggaaggatttatgggaacaccgccagtctctggctacgggagcatgcgacacggaacccgtcatcagggaaatcctctccctgcgccgtgaaaaagcacatttatgcggatataaggaatacccggattacgccctgcgcgagagcatggcggaaaacggggaaaacgccatgaagttcgtcaatgagctgctggacaagatcaaggccccctttttccgtgaaatggaaacgctccgcagcctgaaggcccgccttacggggcaggaaaacgcccgcctgaatccctgggacgtggcatattacgccaatctccgggcagaagaacatttccggctggaccaggaggagctgcgccgccactttccccttccccgcgtgctggacggcctgttttccctggcggagcggctgtacggcatccgcgtgaaggagattccggcgcggcagtccctctccggcatcccggcaggcgaatccgccggaaccgtggaagtctggcatccggacgtacgctttttcacgattgacgacggcaacggcaaccggctgggttccttctacctggatcttttctcccgtagcaataaacgggctggagcgtggatgaacaccctggatacgggcagcccgtccacgccggagaccccgggcaagccgcgcctgggcatggtctgcctcaatatccatccccccgcggcaggagatacggtgacactgtcccaccgggaagtcaggactttattccatgagttcggccacttgctgcacctgatgtttaccagggtttccattccttccctggcggggaccagcgtgccgcgggattttgtggaagtcccctcccaattcatggaaaactggtgttggcggccggacgtgctgaaaagctttgcgcgccatgaacgaacgggactccccattccggaggaaatgctgaacgctctggacgcctcccgcggcaatacgcctgccctcgcgctggccgggcagctcctgtacgcaaagatggacctggccgtgcattcggaaccggaacgcttctccgcttgctctctcgatgatgtggattccgccgtagcgggagatatggattatttcaaagatttcaaaaaagagagcaagctgcgcacggcgcgtcacttgttttcctctcctgcgggctatgcctccttttatttctcctaccaatgggcggaagttctggacaaagatatttttgaagcctttgaacgggccggaggcccggacagggaaacggcaggaaaattccggaaaaccattctggaaaaaggctatgctgtcccgcccatgcggcagttcatggatttcatgggaagaaagccgcgcatggacgccatgctccgcaagaggcggctggcatcctgaaataaaggagccccaaaccacagcagcctcttccgcgcggcacaggggcaagtcacatattatacatttgtttaattaaattatccctttattatgcaaaggttacagatattttgcagaattcagaacacatctttgcgttgactttgcaagaaaaagaagagaaaattcttctgctttgccgcatcttccggcaccagccgcaaccaaccgcattcatttatgtataataagcctttgacgtttgccgcaacaaccctgctcctttgctccccggtgatgatattaacttcctgcgaaggggaaaaggattccgcagcccaggcgcaagcgctcgttcccgaagtgcaggtgaccaaactggtcacgaaggatgttcccatcaggcaggaatgggtgggcaccctgcgcggcacggaagatgccgaaatccgctcccaggtgacgggataccttctttccaaggattaccgggacggcgcttatgtcaaaaagggccaggtgcttttccagattgatccccgcccgttccaggcaacgctggaccaggcccaggggagactggaacaatatgaagccacgctgaaaaaatacaagctggacgtggaacgctacaccccgctggtgaaaaccggctccgtcagccgcaagcagctggacgatgccctgcagcaggtccaggaaacggaagccgccatcgccacggcaaaggcccaggtggatgaagcaaaaatcaatcttaaattcaccaccattacagcccccatttccggcctggccggcctggcaaccccttccatcggcaacctgctgacgccctccagccccacgccgctgaccaccatttcctccattgaccccattcgggtggatttctccgtaagcgaacgggacttcctgaactccatggacaataatctgaccaggcagaagcacctcaaatttgacgtgattcttgccaacggcacggaatatcccatgcagggcgaacccgtggccattgacaggaatgtggatgcccagaccggtaccatcaacatcgtcgggcacattcccaatccgaacctgacgctgcggcccggcatgttcgtccgcgtccgcgccacggtgaaaacgctggaaaacgccgcgctggtgcctccgcgcgccattctgtccgcccagagcgccaaattcatcatttacctggatgacaagaacattccccacatgcaggtcgtcaacctcggccccgttgttgacggcatgcaggtaatcaacatcattcccatgccgcactccaccttcacgaaggacagccccatcgtggtggagggaatcatgcaggcggccaaggtgcagggacaagcccccgtcaagccgcttccctacaagcccgtagtttcccagcccgtcatgccctccataggggcccagtcctttgaaaaggccaggacgccagaaggcatgaaggatggagaagcccagccgtccgccaagtaacctcccttatccggagacccagcatcttcccttttcccgcgcattttcatgatttaacgccatgtccagcttcttcatcaaacacccgaccattgccatcgtcatctcgatcgtgatgatcctgctcggcggcctgtccctgatggggctgcccattgagcagtatccgaacatcgtcccgcccaccatcaagatgcaggcgacctacccgggcgcgaatgcggagacggtggccaattccgtagcctcccccattgagcagtccatttccggcgtcgtggggatggattacatgacttccaccaacgccaacaacggcatctgctccctgagcatcgtctttgaagttggcacggaccccaacatggaccagacgctggcctacatgcgctacgggcaggccaccgcccagattcccgcggaggtctcccagatgggcatcaccatcacgcagtccacaggcagcccgctggccgtaatcaacctgtattctccagatgacagcctgaacgccatcttcctgagcaactatgcctacgtgagcctggtggaccccgtgaaacgcgttcccggtgtgggcgacgtgcaggtgttcggcgcaggccgctacgccatgcgcatctggctggacaccaccaaaatggccgcccagaacatctccgtgggagaagtccagtccgctatccaggcgcagaacaccgtgattcccggcggccagatcggcgcggagctagcccctcccggaacggaattcacatacagcatccagaccaagggacgccttcagacggctgaggaattcggcaacatcatcatccgtgcggacgggaacaagcttctttacctgaaagacatcgccaaggtggagctgggttcccagacttacaacgtatccagtaaatacaacggcagggattccggcgccatcgccgtgtacgccgcccccggctccaacgccatcaacacggtggacgccctggtcaagctctttgaagaccgctcccgcagcttccccgccggaatggaatacaacctgacgctggacaccacgctggccgtgcgcgcctccattgaggaaattgagcacacgctggtggaagccctcctgctggtggttctggtggtgttcgtcttcctgcaaggctggcgcgccacgctgattccggccatcgccgttccggtttccatcatcgccaccttcgcgctgtttccgctcctgggcttcacgttgaataccatctgcctcatgggcatggtgctggccatcggcctggtagtggatgacgccattgtggtggtggaagccgtggaatcccacatggaacgcggcctcacgccccgccaggcggccttcgccgccatggaggaagtatccggccccgtcatcgccatcgccctggtgctggcggcggtgttcctgccctccctgctgctgccgggcattacaggcacgctcttccagcagtttgccgtgaccatcgccatttccatgctcatttccgcgttcaacgcgctgacgctctccccggcgctgtccgccattctgctcaaacccaaggacccgaccaagggcggcccgctgaaatttttctaccgcgttttcaaccgcagttatgacgccacggccaacggctacaccaaagtgtgccacttcctgacccgcaagctcatcatctccattccgctgctggctctgatcgcctacgcgattgtccccgtagccaagaaaatccccaacggcttcctgccggacgaagaccagggctacctgttcgcggccctgatcatgccggaagcccgttccctccagctgactacggccgccgcagacaaagtttccgaactcatccgccagaacccgaacgtaaaagacgtgattgccatctccggcttcagcctgctgacgggcgtgcagagcacgaacaacgccttcttcttcgtcatgctcaagccctgggaggaacgccccaatccggaccagagcgcccaggcggtcaccgcccagctgaacgccctgctgaccacgaaagtttccgaaggcatcaccatgtgcttccagcctccggccattgcaggggtaggttccgccaacggcgtcaccttcatgctggaagaccgcgacggcaagggcacggaatacctggcggaacaaacggacatctttgtgaaggaagcgaacaagcttccgatattcgacccgaacaacaacggcggcgtgcgcagcgtgatgtccttcgccgtggaacagaaagatgtgcggctggatgaagaaaaatgcgccacgctgggcgtcagcatcagtgaagccaacagcctgctccaggcctacatgggttccctgttcatcaactacatcaccctttacggccagcagtggcaagtgtacatccaggcgcagggcagtgaccgcaccggaacggacatgctcaaaaacttctacgtgaagaacaacacgggaagctccgtacccctttccaccctcgtgaaaatcacggacatcaaggggccggaattcctgctgcgccagaacctgtacaactcatccaagctcatggtcacgcccgcccagggctactccaactcccaggccatggaggcgctggaaaaaacctttgaagccagcatgccttccgacatgggctacagctatgcggacatgagctaccaggaacaaaaaatccagaacggtatcggcatcgtgcagattttcctgctctcctccgtctttgtcttcctgattctggcggccctgtatgaacggtggtccctgcccctcagcatcttcatgacggtgcccatcgcggccctcggcgcgttcctgggcctgtactggttcggttatgaattgaacctgtacgcgcaaatcggcctggtgatgctcatcggcttggcggccaagaatgccattctgattgtggaattcgccgtcattgaaatggaacgcggcaaaacgctgatggaagcgacgctttccgccgcaagaatccgcctgcgccccatcctgatgacatccttcgctttcattctgggctgcgttccgctggcgctggcctccggttccggcgcttattcccgcaatatcatcggaatcgtggtcattgccgggatgacgatggcgacggtcgtgggcattttcctgattccgtgctccttctacttcatcatgaagctcttccgcgtacgcatcgcccggaagacggtggaaacggaagacccggacgaaatcatcgcccgcaaacacctgttccacgaagcccatgaatcattaaaagggtaaaaccgcccctgcaaccatctaaaaacagactaaacgcatatgcgaacaaacccatacatcacacgcgccatcctgctgggaacggcttttgccgcctcctcctgcatgatgggccccgacttcaaaccggtggacatgcccatgcccgcggcattcaggggagcccctgcagcgacggaatccattgcggaccttccctggtggaaagttttcaaaaacaaggaccttcaggacctcctgacggacacttacaataacaaccgcgatttgaaagctaccatggcgcgcgtggaaaaggcacgccagtacatcaccatcacggaggccccgctcttcccgtgggcggattattccggctccgtcagcaaaggctccaactataccggcggcagcatcgcccagactaccggaaccacattgacgccaggagcgattgatgccggcatttcctgggaactggatatctggggcaaaacgcgccggatgacggaagcggcccgcgcggattatctggcttccgaagaaggccagcgcgcgctcatgctttccctgctccgccaggtggcggactcctacctccagctcctccagctggacgaacagcttgccatcgtgcagaaatccgtggaatcctattccgaaagcctgcgcctgtttgacgaacagcttgaaggccaggtaggcgacaggcttcaggtggcttccgccaaggcggctctggcctcatcccaggcccagattcccgccattcaggtgcaaattgccaatctggaaaatgcagtctccgtcctggccggacgcgctcccggccatatccgccgttccggcagcacccgggacatcgcctataacgtcaaggttcccgccggcattccggcctacatcctttccagaaggcctgacgtccgccagagcgaataccagctgcgcgccgccaatgccgaagtgggcgtggccattgccaactacttcccgaccatatccctgacggcggcgggcggcctcgcctccgcggatctgcgccacgtgcaggggcgccgcggcggctgggggctgggagccaatctgaccggccccctcttccaggcgggcaaactgacggcttccgaaaaggcggccaaggccgaatttctggcggccagaaacgattatgaacaaacggttctcaatgccctggcggaagtttccagcacgcttatccagagggacaagctgcgcagcatcaccgccacccagtccgaggccgtggaagcctaccacacggcggtgaaactctccttcgaacgctaccgcacgggcctttccaattacattgaagtattgtacgcccagcagaacctgtaccccgctcagattcagctttcacagtattattaccagcacgccagcacgctggtttccctgtacacggccctgggcggcggctggaacatgagccacaaggctatcatggacggccctgccaggcagtaaaacgcgccccttaaaacagggaattttcctgactgttttttcatcctccggcaagtacggcttgccggaggatttgttttccggccatgaggaaaacgccggttctccaactgcctccccgtcctgtccggaaactgcgggcctccttcgcccggccgcaggaaccgcgggccgggaacggaattcccaacggagaggccctttctcctgttcttcctcacatccggaaagtgcaaggtctccagctgtccccctctcttctttccccgcagaaacggaggccatgtcggaatcgattcaatttccgcccacttacggtcaacaggctgcggaacaaattcatttcgtttttcaggaatgaatggccgttgctcccgatattccatcatttccaataaggcaaggcatctcctgcttttttatccctgatgttcaacctcctgccggattcctaatccgtttgcggcatcctgcccttccaacaggggtaaaggcaggaaaatcatggcaaaagaaatggaccggaaaagaccagcacccggcaatactaatgaaagttaatgtattacatcaaataacacacttatcatcaatatttttaattgttggcggattaggaatccgataaaaagcggaatccctttatgcaagggcttttctactaattgacatgaagactaaatatcttgccctcctgatcgccgccatgggaagcagcctgtccttcggggcttccatcgacggcctagacgcggcttattcaaaagattccaccgtctatgacggaacctccggcgatgcgttgactgtatcctcccccacgactattggcgtaaacaacaccgcccactggacaatggctttcacgatttccggtctgggaagcacttcagagtcaaatgtaggattgctgtttacctataataccggctcttacaaaaatctggaagggttggggtttcaactttcggagtcaggagatctcaccctgtgcgccggaggttttgcttacaacggaggcactaattcctccccctggaaagcacaaacattttccgattattccaccagcaagcctctgaccctgttttacacattcaatgcagggaatgtctctatctccgccatgctgggcaacgacacatccacactaaccacgctgaccacattgagcagcggcgctgccttcagcggccaaaacatgacccagatcaatttttccgccaaagacgcctccggaaacacatggagcgctccgaacggaatcacgggagaatacaccttgaataattttgacctgtacacggccgttttgacagaagaccagatgagggaatatgccctgagcgccgttccggaaccggctgcggcctctctcggcctgctggggctgggtatctttctgatgcgccgccgcagggcctgactttttccttaccgcgtccattcctgctccgttcagggatggacgttttcttcactctttttcaaatatccttttcatttttccttgacgctctgatgaaagtccggctccctctccccctcctggctgccttggcggcggcatttcccgcagcaaccgccgccccggcgggcacggaactgggaaacgtcatgtacgtgggggactccatcacccacggggtcaacagcgcctcctaccgctgggccctccataaaatatttacagacaacggtatttcctaccaggcggaaggcgtcaaaaccggcaattattccgggggcgttactgcgggcacctcctacgggggccagatattcaacaatgaacattcctcccaggcaagcgccagggcctgggaaatatccggcaggagcagcggaagcaggtttgacggctccaacatttacaactggctggggctttccggcaccaaggcaaacggaagcgcctattcaggccagacattcaccggggacaatacgccggatacctttttcatgatgatcggcaccaacgatctcctttccgacggaaacaacgccacgctggcggaccgcattgactccgtttctcaaaacctcctgaacgatatggacaccatcgtggaggccatgttccaggccaatgaacatgcgaatgtcatcatccttaccattccctgctggacccggcattccaacggcaattcggacgccacccaccaggccgtgtctgattacaatgatcgtctgaaaacatgggggaatggcaggcagaacgtcacggtcattgacatcaatgccggcatcattgacgtagcatcctccacgccgttctacggcgtaagctccatgttcaacaaccccggcagcgacggcctccatcccaatgcccagggagatctgcttatggccggcaatatcgccagggccatgggctatgcggggcgcaccgccggacaggaaagaaaagccgctggcggcctggccatcaattttcaccagggcgggcaatcccccgcatggaactcgaacagccagttggaaaataaagggttttccctcgccaacgtcactgtggacgagaacggcatcagcctggggcaatccggggaaagctccatttcctattcctgggcggaagggacggagctgcaaaacggcttcacctttgattgcaacctggttctgggaaacggcgcagcagacggatgggatactgcctccgatttcagcatcagcctggggaacagctccttttacggcacgctcaatattaatgaggcctacatcaaatggggcgatgccattctgtattccctggacatgtccgccaatgcggaaaacctgcgtatggcatatatctgcggcaatgatatggaaggactgaaaggcggctattacgtctggctgggagacatgctgattggggaagcgctttccgttacctccggctccggctgcaacggcctcaccattcaatacaacggcagcggaaccgctgttctgcacgacctggccctggacggcacgggttcctatgcccctgccacttccgggatgcttaacgcggaaaagtcttttatttcttccggctccttcacccagggtggaacaccggaaggcaatattgagtggaaaacggagggattcaccaaaaccgctgataatctggctagctccggtacctttaatgcccgctcccaggcggattcctccgcagggggaacggggaattccgtaaacgtctccattacctccggaaacgccactcatatttatgcgaacagcggcaactacacgggagacgtctggctgaccatctccaaggagggacaagcctccgcctggtacggagctcacggagcttccggcacgctcaacgggaacgccttcctccgtttcacggatgccgccacaggcggaagcacggtcttcggagccgtgaacgccgccggcgtcaccggaaacgtttatctggaattctctgcggaaaacgcctccttcggcacctttaccagcagtaattcctcctctgtggtcggctcctatgccacggatatccaggggaatgtggacattgtggtcaactccggctccttcaaccatcaaatcatgggcggcatcttcgcaaatgccagaaccggaaccaccaccattggaggaaacacgcatgtttacatcaacggcggctccgtcaccggaaatgttatgggcggcggcctgacaggctccatttccggcggcgccaacgtcaccgtcacaggcggcgttatcagcggttccgtttacggcgcgggccagggcggctccatcctggcaggaagctcggtttgcttgacaggaggcctggttaaaggggacgtctacgccggaggcaaggcgggttccattcagggggacacgtccgtcaccatcaccggaaacacggccacgctttataacgggagctcctggggcagcatctccggcggcggttccggcggaacggtggagggaaactccaccgtacgcatccagaatctttcctcaggaacgacggcctacggctttgacaaatacgccggaaacatcagcggaggaaccaacgtaagcggagacaggagcctggtgctggaccatgtaaccgtggacagcctcctggcttccctgagtgacttcacccatatctccgccgtcaaccagacccgcacctcactggattccctgggcggggcgctcaccgtaaccattgaggcgggaagcagccttatcctgaacggaacctctgacctgaccacgcttattctgggggaacacgcctccctgacgcttcaggggctcaccgcagatgcggtcgtcgtggacatcacgggaacaaccaattacacactctccctgacagagatacctgccagcctggacaatatcaaattcctgaacgacggcgtcctgtacgacgcggccatgtccatggatcttcaggccaattccgccatgcttttcgcccaggtgccggaacccggaagcgccgccctggccctggcaggactggccccccttctgtggaggaggcgcagaaaaatgtcccattgaggcccttcgttttcttcaggccctgatggacaaaagaagcccccgccagcgcaacgccggcgggggcttcccatgcggaaaaacggcggagaagaaaaggaaaagcatccatccctccccgggcgtttttcatggaacaggggggatcaggcccctctgtttttaaacagttccagtgcgagctgggaccaggtctccagtttctcaaacatttccccggacaattcctccggagaaacaaaacggagattggccagggccgcttcattcgcgcgcacacggtccgtatccagctcaaacaggtggacaatgcccagatgcacggcccccacgtcattggtatcgtcattaatcacgccgagaacccgctgggtgcagttcccgtcaataaccagttcctcgcggatttcgcgctccactccggccagataggtggaaacgtcgtcatggccggattggcggtccaccggattgatatggcctccgatgccaatggagcccttgtcatgcaggcgggcctcgccgccggagcctccgcgcgtgtaatgcagaatgcggccctggtggcagaaaatggcataggcgatgatctgtttgtgggaagggtcattttccgcagcctcccggtccatgaacgaggcgacgcccggcttcatgaacgcattcagataatgatccccgccttcccggtgtccctggaaatagcccgcttcctcaaaggcggcgcggggaaccaccagaacctgttctccatggtaacgtgacatggaaacaccctacccgttttcatcccgcgctcaacaaaaaaggcgctgaaacggcaaatttgccccttccttcaggaaggcgcgggctgcccctccgcatcaggagacatccctcacttccacgccatgattccggaacctgcgcatgatgctttccagctgttccgcatccatgagatggagcggcagccacagcaccagcttcttgccgaacaggaacagcagcgcgtggcgcgtcctgcacaacgtggaaaaacggtcgtagggaatattcatggggtcaacgcccttgctggagaacgtcaggtaatcctcatgaaaaacgtaatccttttcctgatggtacatgggcacctttttattggcggccagagcggcctttgccagaaaggggacgtaaaaccaggacaggataatcgccatcagcgccccggccagggacagccaggcgaataagggcagtgggcgcagggaaaaggaatacagcgccatcaatacaaaaaaggccgtaatggccaggtccagcggctttttccacctggggcgcaccgcatggtaccatgccaccagcacctgggttgccaggcggtcggaaggtacgggtttgacgagtttgatgacttctgaatcctgcatcatggcggcagggtatcttcattcccgctgaagaaaaagcctaaaagcaggctcttccgccgccattgtgtcaaaaaagcccctccggaaaggtctcttcccccttttttccgcctcccattcacgggggaaagcctccttcccccgtatgcaggccagaatttccttgataatcatgccttccttcatagaatgaaaaaccaaaagccttcagaagacccggtggcagacaatcttcaaattcacgtacgcacgttccagccctcaaccactcaggcacaggctctggaaaccctgacggattccatggcggaagtccttgacgaccggcagctaagacacatcaagaatgcggttcttctgcgtgaggaaacgcagaccacctatctggatcacggcctggccgtcccccacggacgcaccagcgcgctggattccatgcaggtcaccgtaggcatcagcccagagggcgtcctctggccggacgattcccgcaacgctcatctcattgtgatgctgggcgtgcccgccgccatggtgaccggctacctgaccaccatgcagaaattgctgcggtggcataaaaacgcccccctgggccccaatggggaatggacgggagatgaagccagtctcctggcgtcccttcaacaagccctgcaatgacggacaagaaaaaccagcctgcggaaaagacgcgcctttcctggtcatggctgcgcatggcgttgagcctgcgtgaaaaaatcaagctgggggacaagcaggtcatcttcatctgggcggtcgtcgtcggagcgctgggtgccctgatggcccttgtctttgaaatgggcgtggaactggtgcaggacgtcctgacggggcggaccagctacaggcaaattcaggtctttcaggaaatggccagccaggacccggcctggtgcatcttcgttccggcggcgggcggccttttggcggggcttacgcttctcttcacccaccgctttgtgccggccaaggcgacggaatacatggaagccgtggcgctgggcaatggatacgtgcctcccaagcccagccttctgcgttccctgtccgccgttttctccgtaggttccggcgcatccatcggccgtgaaggcccgctggtgcaggccgccgccgtagcgggctccgccctggggcgtttcttccacctctcagctcctcgcctgcgcctggtagtggcctgcgccgccgcctccggcatgtcctccgccttccatacgcccctggcgggcggtctgttcgtaagtgaaatcgttctgggcgcgctgactattgatttcctggctcccctgctggttgccagctgcgcggggtactttaccatgggcctgttccatgaacccgcccccatctaccagctccagcaggaagtttctctggcgggcaaccagcatgtgctctggtgcgtgctgctgggagccctggcctccctggtcgccagtttctggctcctcatcctcaaaaaatcgcgccggtacctgaacggcaagcgccaatggctgcccgtgcgcctgacggcggcaggcgtgctggtgggagccatcgccatcttttacccggaaatcgtagggaacggcaaaaatatcatcacctccctcattcattatgaattcgacgccgcgagagccgccgtcctgctgttcctgaaaatattcaccgtcgccatcgtcttcggcgtgggaaccgtggggggcgccctgacccccagtctgactatcgggagcgtctgcggcttcctgttcagcgcggctcttacccagctgggggtgcccggggaccatgccatcgcctattccctggtgggcatggccgcctttttcactacagctgcgaacgccccgatcacctccctggtgctggtggtggaattcaccatggccgggcaaatgatgttccccctgatcatcggcgtgctggtttcttacggaatggccagactcaccaaagcccagtccatgtaccatgattccctggccttcggccccagaagcacctttgacaaacccctggcccaggtacagcttcaggatgtagcgcgcaaggatccgcctgtggtgcatcccctggacaaattcggcaccattgccgccatgctcattaaaaacccggcccagcccatcttcgtcacttccccggccggcaaatacctgggaagcgtggtggcggaagacgtggcggcctttgcccgcaacaaggagctggcccaggccgtactggccatggatgtgctgcgcagcgacatgcctacgcttcctgcggacatgcacctcccggaagccctgggtattttctcccgcccccactgcgcggaatccctggcccttgtgaacccgaacaacgatctgctgctgggcgtagtcaacaagacggacctctacctggtgctctctgaaatcatgcgcagggaaaaactgcaataaaatctgccttgccgcgctgtatccgttgaaatactggaaaaaacgccgcccccttccgcggtttgcgggaaatgcccgttcaaggccgaacacccttcccgtccaaagggcaatttcccattcttcgtgtctgcagcgtccagccttcctttcacgccctaatccgggcatgacctccggggaacgacgcatccggggctccgttcatgagaaaacacggggcaaaggcatgcatttcccggcaaattgccctgccgccgtcccggaacgtgaatccggcttcttccgcaatcctctgcccggaagccctccggaaaaatttgctccttccaggaaacgcggacaagcctggaaatgcatttttttcaccctcttttttcataataggggtcaggttaaaaataacaacaagcttgcatttcagaccttttccggtacgcttccggcatgagccgcaccctgagaatagaataccccggagcagtctatcacgtgcagagcgagggcaaccgcggagatgccatttacctggatgacgaagacagggaaacttttttgcgaacttttcaggaggcagcccgcagaagcggctggatcgtgtacgcctacgccctgatggccaatcactaccacattcttttccaaaccgcgcgcgccaatctggtagatggcatgaaatggctccagactgcctatacccagcgttttaacgcacgccaccgaatgcggggtcatctgtttgcgggcagataccacgccatggtggtggaagcggataacgcccactatttttcaaccatcattgactacatccacctgaatccggcccggtccggcctggcgcgacgccacacgttcctttccggctgcaaatggacgagcctgcccgcatggctggcctctcccgccaaaaggcccaaatggattcatccggaacgcggcctcgtctgcttcggctgcgacgacacggaagacggccgccaaaaatacctcaaccatctgatgggccgttttgaagcggaacgcatggatgaacgctccctgctgcccgcttaccacgttggccccggcaccgtccagcggggctggtgctacggctccagcgccttccgcgccaggctggtgggggaacttccccgtctggcgcgcagaaagcccgtcacgacgggcatgcgagcgtcggaaattggggagtaccaggcggaaattatcgtaaaaaacggtctgaaggcctttggcctctcggaggaggagctgcttgtcacgccttacagccacccgtccaagctcatcatcgccctggccgtccggcaaagtacgctggtaccgtatgcatggatcagcaaccggctgcacatgggtattcccaaatccatgggaaccttgctccaccgggcaaaaaaaatggcggaaacggatttgaaaacgagggcgtggatcgagcgcctgagctcctgacctccgttcctcccacggaataatttgaaaaaaatttcctccctccacaaggatgcgccgggcatgaaaccgtcctcccgcggcaggaagcactcaaggtcagccccttctccggcgcatcatcatgcaggccagcccaagcaatcccacggatgccgcattcggttccggaactactgaaaaagccatggcggcaattccggccttctgccaccaatgcggaaatcaagatggttcccacccatcgttgtttgtaacattccagctctgccgccttgtctgttcctgataattttttcctttgtcatccattcttcatggacaccggattcaaaattcgccttacggaaacagaaacccgaataaccgcatgcaaactacatgtcccggcatccggaacacgcagttctggcaggcgtcaatcagcaagaacagggtcagtttacaaatcacaacatataaacatattttctattttcttactgacccctgaaggccgccagggaaaaaaatgattgccagtccgcttagcggaatgataaacggaaggcgcgtgcgaaaaactgcgcgtaaagcgtcaacccaaatacaacaacagaaaagatggcacagacatattcccagcgcgtgctcgacttggttaaggccaagcatagccacgaaaaagaattcatccaggccgttcaggaagtgctcagcacgatcgaaccggttttggccgcgaattccaagtatgaagaccacgcgattctggaacggatcgtggaaccggaaagaaccatcctgttccgcgtgccgtggatcgatgaccagggcaaggttcaggtgaaccgcgggtaccgtgtggaattcaacagcgccatcggaccgtacaagggcggcctccgcttccatcccagcgtcaacctcggcatcctgaagttcctgggttttgaacaggttttcaaaaactccctcaccaccctccccatgggcggcggcaagggcggttccgacttcgaccccaagggcaagagcgataatgaagtgatgcgcttctgccagagcttcatgacggagcttcagcgccacatcggcgcggatacggacgttcccgcgggggatatcggcgtgggcggccgcgaaatcggctacctgttcggacaatacaagagaatccgcaacgaattcaccggcgttctcaccggcaagagcctgaactggggcggctccctcatccgcccggaagccaccggctacggttgcgtatacttcgcccagaacatgctcgccacccgcaacgacgacttgcagggcaaagtctgcctggtgtccggttccggcaatgtggcccagtacaccgtggaaaaacttaacgaactgggcgcgaaagcggtcacgatgtccgactccaacggctatatttacgatccggacggcatttccccggaaaagctggcctgggtcatggaactcaagaacaagcgccgcggacgcattgcggaatacgtgaagcagttcccgaaagcccagtactttgaaggccagcgtccctggagcgttccgtgcgactgcgctttcccctccgccacgcagaatgaaatcaacggggaagacgcccgcaccctcatcaagaacggctgcaccctggtggcggaaggcgccaacatgcctacggatctggaaggcattgaaacctacctggccgccaaaatcctgtacggcccggccaaggccgccaatgccggcggtgtggccacctctggcctggaaatgtcccagaacagccagcgcctctcctggacgcgtgaagaagtggaccacaagctgaagaccatcatggccaacatccacgcaaacgccgtggcccacgcccatgaatactcctccgacaaatccttcaccaactacgtcaccggcgccaacatcgccggcttcgtgaaagtggcggattccatgatcgaccagggagtagtctgaccccggcccgacatacttgctgccaatgtaaaacacaccagaagcgccgggttcgcccggcgcttctcttttctgcggaaacgtctccattccggaagttcctttttcctgtatgagccagacatgacggtggaaggacttcaaaagcctcccggcaaccctcaggactttttcccggctgcagggactttgtctgctgtaccacggcaatctccaggtattcaccctccgagttggactgggcgatcaaaaacgatccagatgacctgtctccggaatttgaagggccattctcttccccttcttcatgttcctgcatcaagaaccggaaaaacgcttccccggctccgattcttaaaaggtactgttattcatttaacaggcggcagacagcctgagccgcatgttccgccgcccctccctgccccaacttgtcggaggcctgtttcatttcctccagcagggcatccctgttttccggaacaagcaggcgttctatttcatcaatcaccttgtccggcataaaatcaaactgaaccagttccttcaccacgggtttctgcgccaggatattcaccatgccgatgaagcgtatcctgatgagcatgcgggccatccagtacgtcagcaggggaaccttgtacaccagcatgtacggcagacggtgcaaggcggcttccatcgtggcggtgccggaagccacaactcccacggcggcgcggtccatcagctcatgatattttcccaccgcaatgtggaacagtcccggaggcatgccggccttccgcaccatgccgcgcattctttccgccagagcctccgtggaagcggcggtttcaaaagacagttccggacgttcccgggaaaggcggttcactacctctataaataccgggaaatgcctgtcaatttcacggttccggctgccgggaaaaagaccgaccagtgacggatcccggacgccctccttacggatggaagcaatttcatctaccaggggatgccccacaaactccgttctcagtccggcttcctggaacaagggagcctcaaaagggaagatgcacatcatcaaatccagcatgcgcaccatcttgggaatgcgcccgcgatgccatgcccacacctgcggggagataaaataaacgattttggtgcgggggcagcacttgcggaccctctccgccagccgcagattgaaccccggataatcaatcaaaacaaggcaatccggctggtcctgccgtatcctttccagaatggagagaaaacgctttctgaaccatccgtattttttgagcacctccaccacgccgataacggcggcttcatccgcccagtcttccacgccgggacataacgcgtgcatgccctggccgcccagccctgcgacctccatgccgggcatcaggcgcagcagattcttcaacagcagggcgccatgaatgtccccgctcttttcgcctgctataatataaagcttcatctctatctgcatcggcgcacgccggacgcctccctaccttaccagccccgttcccgggacgcaataaaagactttcctttcaaggattttaatgcaagatacgcgccgttatgcatgagttgatctcactttggatgtcctgggtgcaggactggggatatgcgggtgtcatcgtcctgatggccatggaaagctccatctttcccgttcccagcgaagtggtcatcccgcccgcggccatcctgtccgcccaggaaggagcatccatgagcttctggggagtggtggctgccggaacgttcggctcctggctgggttctgccattacctacgccgtggcccgaatcgtgggccgcccggtcatcatgcgctggggcaaattctttttcatgccgccccacaaggtggaaaaggcggaaatcttccttcagcggtacgaagtttccggtgtcttcttcgcccgccttctgcccgtcatccgccacctcatttccattcccgccggcattgtccgcatgggattcggcattttctccctggtcaccgtgctcggctcgtttgcctggtgcacggtgctcgcctggtacgggcaccgcatcggggaacggcatccggaattgctcaaatctccggaggagctgatccgcaccgtcaaaagcgaaagtctcccccttattctggccgtgctggttctggccgtctgttacatactcatgcttcgtctgacggaccgcaacaagccggaaaaagccgcagcggacacgtccgcagaaaaagagcagtaacccccctttttcccatgatcccttccaaggaagaccgggcagcccgggcgctggattatttccaccagggatataattgttcccaatccgtttttgctgcttttgcagatgtctgtggcctgacggaagaaacggccctgaaactgtcctctcccctgggggcaggcattggacgcatgcgggaggtatgcggcgctttttgcggaatgagcatgctggcgggaagcctgtacggaaacagttccccggaaactggagaaaaggaaaaaatcttttccctggtccaatccctggccgcctccttcaaacaggaattcggcactctttactgccgggaactgctggggctgtctccggagagcctggcagcggaaacggcgcgccccggagaaaggactgccgcctattacgcctcccgcccctgtgaacgctgcattgccttctgcgcccgctgcgcggccgagctggaagcaaaagcccggcatcatgaaaatacccggccccctttgcaggggaaccgggcgctttaaccatacgcaaggcgccgtcaatgagaggcggaactgctgcatgcgccgtccgggcaggacgccttcagcttgtctatcttttcattggtttcccccatcccctcgtcataaaagccctgctcgtcaggggccagcacctggaggaggcggagaaattcgcccgcgtgttccttttcctcattggaaatatccagcagaacttcctgggccagcttatggtctatggattctgcaagctgggtataaagctggatagcttcatattccgctgcaatcatgaaccggatggctctcaccaattcgtcatgggtgagtttccggttttcctttaatccgctaaatgcatttgtaaattcaggcatgcagatatgacccagactgcaatgaatacattcaaaatgttcctgtcatatattttcagcgacattctttgaatttttattcataaccaatggtctaagaaggccagtatcatcccgaatacggatgaagcacggggtttcacttatactgctcgcttttacaatacattcccgccactggcacgtaataaggaaaagagataccgcaaaaccggaacagaaaaacgcccggcttcacctgaagaaaaccggacgttttacagcaaaggatgaaaagcactgtcaatgggcggcggaactgctgcatgcgccgtccgggcaggacgccttcagcttgtctatcttttcattggtttcccccatcccctcgtcataaaagccctgctcgtcaggggccagcacctggaggaggcggagaaattcgcccgcgtgttccttttcctcattggaaatatcccaaagcacctcttgagccagcttgtcatcaatggaggcggcaagctgggtataaagctggatggattcatattccgctgcaatcatgaaccggatggctctcaccaattcgtcatgggtgagtttccgatcctcctttaggccgctaaatgcattcgtaaattcaggcatgcagatgggacctgatacgtaacccattcattcaatatgctttgtcataacttttatacgatggtggccttaaagcagtccagcgaacaaatttccagcctctcttgccggaacaaaaaaagagcgccggattctcgtccgccgctcctgttaatcaagctcctctccggaacacctgccttacttgccttccgcagtcttgggtgcgtatttcttgaaaaattcaacgtactgggcgggagtacggccgggaacataacccgtgcggcccagctccttgccctccgcatccaccaccaccatggccggcacgccggtaatgttatacgtcttggcttccttggacttgctgaaatccgaactgccgaactcaaatttgacgccaatggccatgccgtccatgccttgtttgaagtcctttttggaaaggatttctttctccagcttaacacaaaagccgcaccaggacgttcccgtgaaaagaagaacaatgggaaggccggtttcctccgcctgcttttgagcgcttttcaggctcttgccccagcggaatttcactttcgccgccttggcagccttggctgcggcttccttgtccgtgggaacgctttgagccatggaaatgccggaaacgctgaaccccagcacagtacacaatgcaaaaataaaatgtctgttcatcatactctgtgaaacgttcctcttagactagcagaaatactttgtataggaagagaaatcagtgtctttttccccgaaggaacgcttccgtcccccgtccccaaaatgaggcgttctcaaaaaaagtattgctctttcctccttaatcaggtaataatccgcccgcacttacaaatgcgcggttagctcagtggtagagcaacaccttgacatggtggaggtcgtaggttcaaatcctataccgcgtaccaccttcaacaaaaagactgcctccggcgaggcagtctttttttattctatctattgaatatcaaaaggattacatcatttttacctgtctgcaaattccgtccgtttactgggggaacgctaaaatgcgttgacgttttgtgtaaaaaattgtgtaagtaatccgtggccatcatcagacatcttccaacatcccggttctggattgctcaatttgcccgcaaactcccttccggagcgtggaaaactgtttcccgctccacaaaggttcccattgaaccgcctcccggatctgaacaaacggtcaaagaactccgggaaactgctcaggaaatcgccaacacctacgaacgtaccgctaaccagaaactcaaggctacccatatccggcgcgtactcgctgacctgagcaatgaatcactcaggcttccgtccgtgcgggaatggattgaagagaggctcacgctcatgtccaaaaccaaaaaagaagccacctataggaactacagcgacgcaacgcgtctcttttttgaatggatagaagaaaaagacgctctcccgctggattccgtcacctctctcatgatggatgaatttcaaaactggctggacaagcgtttccggccatccacccgcaaaaaacattttagtgccatccgccattttttcagcaccgcaaaaaaactgaacctgctggacaccgacccctgcgaagcggtgacgcatctttcatccctctcccgcgccgtttccgtagaagtttcccgccgcccgtttaccgtggaagagcttcaacttatcctgaccaacagcaatgaggaatggcgcagtatgatactcacctccctatatacaggcggccagcgtctgggagatattgcctgcctccaatgggatgccgtggattttgagaaaggcattctccactttcggacccaaaaacgcggcaaatccctcgtcatccctttgtggaaccgtttacgtgccttgctggaagaaagatatccccaccgcatcaacgaatacatacacccctcctcggctcaaaaataccagcgcacgggaaaatcatccaccctgtccaatgaattcgggaaaatcctcttcacctgcggcctcgttgaacgagatccttctcttgccgggaaacgatatcagaaacaatatggaacatctcaggacaaaacccggcacaaaaacgccctctcctttcatagcctgcgttacacggctaccactctgcttcacgaagcgggagtgccgcccctgattgtacagaaaatagtaggtcacgattctgcgaagatccatgaaggatatgccgctttctccctgcgggaatcggaagaagccttcaacaaattgccctcattctaatcgttgctgatagccccggccagaatcaggccatgcccccgtgcaatgctcagttccaaggcacgtttatattgcccatccgtgggagccactacattcacccagccgttcccctcactcacaggaaacagttgcatactccctgaaccacatccgcacttggcaccagtcaaatccacctcatccatcagcacgctcactttcggagtaacagctttcattccgctaaactccggcaaatccatttgggtcgtcctcaatacggcagtaaacggtacactccgttttcccacgcaatcataatcgcgggcttcccagtccatcttttcgagcataacttccccatctctctgcaccgcaaggaataattcatccaccgccctacctgtcgccgtacaggccaagccaacaacatccccccccaaaatcccagcaaaaccaagaggcaagttcctgatccggattatacagcatccccatcaatttacctgcatactccccggattccggaacaacccacgccaccggttccggcgcacgttgccataccatcccgttaattcctccgctcaacacgccgtaggaaaatacggtcatatcgcgtgcgaaataaaattcattatccatcgaataactaatgcgcctcagcctctttccggaacgatcaacaaacatgatagcatccgtagtcatcaacacgtcactagttgaaaaactcccgcaattactgtgctgttctgctacggcggaggaactactcagtacgtcagctttaatggacctgacggccacttccccgcaggttgtcccacacagcaaagccgtcccggaactcgccgcccacacaagttcgctttgctgactgctcacaagcgttaataacatggcatccgccgtattatcgccggtacggaaattgaaataatcgtccacggcactaaaccacagcgtcagaggttgtccggacgtaccgccgaacaccagctaagtacggcgtgtagcacacatgttacagggaaaccgttttgtttccggaatgcaaaaaaatcccactcccagcaatggcgcacgtcaaacatgtcaggatcatttaacaaagtcacttgtcctgtcccatcatcctttaaggaaacaatctccgcataattgattaaatcaaacctcttacgcttaaaatacttcttgcccatattactaacggcaagattaacgtcatgctctaatataacgcacctcatcaacaaaggaacgccatcattattgcccgttaaaatgacctccgtattaggcgtataggaatcaacattggtaatcatgttctcccatctcagaccatcggaagaagtctgaaccgcccacaaattataatcggatttattgacagacccaaactcaaattccccgctcaccaccgaacggaaaaactctatcccaggttcaaaataagacggccacgcatccagatcggaaccgcttgctaccgttgaatcagcagtccatgccttcacgcaagtccaatacttacggatgccggaaatatcggaatacaactttttacctacggcataactcgttgtcttgaggtttgccgccgacaatccattcatgtgttggctcacatcgaaatacctcttccgttcgctgattttatgccgtattgccagcacgtcgcctacacaaaacatctttccgtcatattctgcgcgaatcacatccccatcttcggaaggtgttacgctcatcctgcggaaaacctctatcacaggctgttccgcccagttggaattactggaatattcataaaatttaaaccgcaacaatgtatctcgttctacagtttcttctaattccgtcagtttcccgtcaaatcgggtacgttctttccaagaagatccgttatcagtagaaacctctataataactgtacctgtccatttacccggaaaaattcaaacgataagtcatgcctcccgcaaccgtcacggaagggaaataattataataagcttccgacttgcccgtagtcaaactggccttttcccaataataaacccctttccctgaatgatactgtacaataataatatactcgttattcagtttatacccatgttgttttacatattgtgaaaaaccaaaactataagtcttcctgtctacttctaccacttcctcccccggttccaatgtattcccttcggtctctccgcgttcgcaaaaatcccaggcatccgctaccctgaaattcactccggaaaacgacaaagggaaagactgattaaaactcccttccaatggataatgatcccacgtaatttctgccacatcatacacgccgccccggttcgtcaacttcacgggcaatctgttggaattggtaatgataaccagatcattaatttgccgcatccggacaatgccgccattagaatcataagcgcaccggaacaatttgacaccatcctcagaaaaaataatcaactccgcgtccagcaccacgaccacggccaacatcccgtccgaccagcggaacgcctgcatggcaacaggccgtccggataaatccgccaaccagcggctaccgaaacgcctgcggacggcaccggattgcaacaactcaaaattcttcatttccacgcatgcgcgtgaaacaccgtccacatcaattctaccagccaaatcacgggacatcagcccggaaccaaaaccaaacctgctaaacttcataaatcaataagtagggggaaaaaatcaccatccacgcccatcatggcatccagcggagccacaacccgcccattactcgcatactgcctgacatcaaccaattttgcctcatctaaaacaacatcgtataacttatgcaaagacagcttcttgtccatactgcctgacacaatcacagccaaacgttctgacgttttacacacaacgcactctatgaaatacgcttaagcagatctgccacaccgttaatctccaaagcgtccacgcaactccgggagatatacaacacctctaaacaatttcctgcaaaacaccttaattcacggccaagcagttcatagctctttgctgaacaccataacagcaaaagaaaatcatcaggaagagcaaacactccatcattcccggataatgtcacacgctttcgtgcaaaataccacgaatgaccttccagacatctcaacaatacccccttgatgatctttaatgactgttcataatgaggatgctcgcaacccggcaattctgtcacccctaaggcttcatacgcttcttcgcgtatatctaaaatactgatattcattatttattatttggaggtgaaaaacttgaaaaacgccacagcggcaggtgaagcaaccgaaaaattcgggatagtcatcaaccatgaaaatcctgcggcccccttgagaattgacggcctcaacggtcagctccacggtttccaacgtccgcatagggtcatccacctccggagcgaaaaactctttcagtcgcgcccacacctgaacggcctgccaatcctcacccaatcccaccagcgcggcaactacggcggccatagccggggcatggtcggctggtatatctgcaggagtgtagcgggccgaaggtctataacctcccgaatcctgataaatgggcatcaaaatgaattcatcccattgaccgggttttggaaactgtatttgtatctcggaattattcatgattctaaaggcacgttaatatcttcgaaatccgccgtttcttcggattcaatggcgttaacggccattgcttccaatgcggcgtacattggattgatcaatccattggcataaaggtagcgattgcctgctcccgtgcgaaccgaggatgtccaggaattgggattttctacatccgccaccaacgtgctgaaccccatgccgtcttcgaatcctgaaacgcctctgagggcggctattttgaacaaggtgtttgtctgacctccccccagctcaatataaagtgacgctttcccctcgtatgacgacatgcttgaaagcccctcctgcatgaaaatgagcctgttgaggcaggcgggaaatgggtggttttgagttgcgggaataaaactttccgtagttttcacctgccatgaatcaccggaagagacgtaataaatctcccgcactctaagcacgtaacctccccggacagaatcacgaaccgctgtggttgtgatgtcgataatctctccgtaattgacggccagattattgcccggaatcatggaaaatgaatccatcgtcaggccgcctcttaccgtttttgatccgcagcctaatccaaaggtaaatttggacgctgttgaaccggacagcggtatcgaaaatcccgcgaaagaactgtaattatgctggccctgcggcccttcaaaggtaaacgtggtcgtactgtgtgcaggagaaccggaagctgccgacgttgaactggttgcataaagtccgacatattgaacagaggtgctgccgctccccactacgggcatggagctggttttgaggtacagaggctgaatcaacgcctgcacggctcctgccagccccatagccaaaaaacgattaaccgctgatgtatccgtcgccgcccccacggcaagcgggatgttgatgcctccgttggcgttgacggcccccgccgccgtcagacctccggccagcgtcatgttgccggaggcgtccacctgcggcatggcctcaagggcctgctgggccgccgtcgcggatttggccgcggcggtggcggaattctcagcatcagtccctactgcattgatacggttttctgcctgatctatagcccctttaacggtttccacctcttgaacaagcggggtaatcgtacccaccgccgccctacggctagattccaccgatgccacagcggactttccagcctccgtaatggccgtggtagccgtctctttagcttccttcaccgcctgaaccgcttctccacggcctgattccacagattccacagcggactttccagcctccgtaatggccgtggtagccgtctctttagcttccttcaccgcctgaaccgcttctccacggcctgattccacagattccacagcggacttcccggcctccgtaatggccgtggtggccgtctctttagcttccttcaccgcctgaaccgcttctccacggcctgattccacagattccacagcggactttccagcttccgtaatagccttggtagctgtctctacaacatccccaaaaccatctactttctgtacaataaattctttcagttctcgaacagaagaaacatggcctcttgcctcttcggcaaaagccccggcttttcggcttaataaatctaccagcccaacttctgacaattcaacaaggataatgccatccgcagtatccggcaaaaccaacgtagccgcatgattaacagaatagctttcctgatctaacggaggcattacacgtccggaaaccacaaatgccccccgaaccaacgctttttccacatgaccagtcactaagaacaaatcgaaactatgccgcccagcaggaagtccagaccagccaaacaataccttcccaccttcgacggcacacatcaattcctgcaggggagccgtattcacggcccccctgaaagtcacgccttccaaatctgccacactccccgtagaatctgtaagcgtcagctcaaacacctgagccagaccgctcaccgtcttaatatccatcacggcgggttccagcccagcccacgtattcagctcaaccatatcttacacctgttggaaatacccatctatggcgcgggcaatcgccacgcaaagcgcgtcaacccgctcttccagcctgtcgcaatccgtcacgtgtgaggccgcaaacgcaggttccagcatcaacgccggcatccgcgtctccttaaaataataataccccctgtcactcttacacttaaccggcttcaaaccgcgatcagggagcctcagcacatcacacattgccgcctgaatcaactccgccgctctcttgccattcttggaagcataccaatacagcgtctccgtgcctccaatccctgtatccgcaccgttaaaatgaaatcccacggccaaatccgcgccaacggcattacacctccgggccgcgtaaaccggtgtcgtgcccccagcctcagaccggttgcacaccacagcctcataacccagccgctccaactcatccttcaccttgccaatatgcaacttccagaaaccatactctgaatgcttccggttcgtcattacagcccctccatcctgcgggctatgcccgatgctcaaagcaacaaccttcatttcccgcatcctttccccttatttttcttatttcttgccataactatctctctttaaaacattatttatttctcaagcttcctctcaatatcttccactcgcaaagcaagcaactgaatggctttagccgtttctacctgcgcctgcgtctgcatggtcatcaattcacaaagccggtcattgtggtggctgaccacctccccgatgtaccagcacgccgcgccgcatatcgccagcgacatcatgacacaggcaaacacgggggaagccttggcaaaatccaaaaaacgtgcttaagcacttcggaaagtttgcacataaccttttacttctttagcgattgaacaacaggagtattttcatcctgaggcttcacaacggacaccaccacagcacccgtattcccgtcacgggacaccaccagcatcccctgttcagaagacaggctcataccggcagaagtggtgcaaccgcccaacagcgcagatgccgcataaaccagacaggcaagaaccagccacaacagccgttcccaccatttcaaccccttgccttccgtcttctgataagcatctttcacgccctgcttcccggcctcaatagccgcctttttctcttcatcagtaaaatttttcatgattttcaacttcttttttctgattctcttattcattattaaccatttatattatccggcctgagaaaaaatcctcaggccggattcattatgcttcatccggctcttcgtagcattccacagctactacccccttatcttcaaatcgcacgccgcccaaaccgatagtggtataaatctgcgtacaattcttcttatccgcacgtttggaaatctctgtccgggaatcttcccagaacccgaaatcaacagcttccctcacatacgccacacaagtacgttttttcatttccttatcgtaaggcaactgttctgtctgtacccactcaaaccccatgaaaggagttttcaagtcgccctctatcagggacttcacagcaacatactgggcatttgtcgctttctcgtcgccaagcaattccatcaactgattgacagaaacaaggaaaatagccttatctccgcgtttcaaggcttctcctttaaccagttttgcgcgggccaaacggatcttgtcaaacgtcaaaccggtatctaccggttctgccggagccttcccataaacggcattcatggcaattttttgagaatcaggcaaagccaccttttccggcccggtcttgcccgcttgcaaagcatccgacaggcacgcattaataatatacttatcaatcgtgcgttcacaagcggccaactgagcctcctgcgtttgtgtaataatctgatctccatactgggtttgcagatccagctgacgatcatgtacataaccgtcctcttcccacgatggaaccatataccgtttggaaaacgtattatcattatccggcgtatccgctttccctccggtggatgtggacaaagctcgtttacctattcttggtatctcaaacatcttgtccctgatgcctgtatgcacagtcaccaaccctctcagtttcgatgccgtctgttgcaggtctgcccgcaacctacggctgaactgaatcgtctttatgtcttctgatgtcaattcattagccatgcctgaaacatgacagaccattcaaaaaaaagagtgagtgctattatcgcacccactccggaaatcccccctgtatcaccttcatccggctcactccccaaaccacttttcagccatcccggataaatgcttcaaataattagctataactgccactcccagactgacggaagtaatagccccgccacgcggattccgccatgccccgaacatggcggccaaactccccagcgttgccacgctccggctctgctgtctcacgtcacgccagctatcggcctcaaaaatatgagtcaggcgcatcaaatccttaacagttaaatctacctgagaccccatgactgccgtctggttctgcatcttcaatcccagccagccgcataccgtatctacagcggaatccgtcaaattccccaacaacggaacaccattcagcggccccagaacaattcccggcagataattcaaaggattcttcttctcgtcatcatccccccccggtctcatgacattattgatcaaatacccaagagcctgcatagccaccccctgaataagccagcttcgcaccgccagcctcatattcccgcgtgttaaataatggatcaccgtagcactccgttgaagagtctctgacatcagaaaccattccgcagaaaaaatccccttcgtcttttcaagcatctttggcatttgaatccagttgataggctgagccgtagataacccttcctcaataacatcccgtgcatactccatagcttccggcttcgtcatgccctgctctacgccctgcctgaaataatggtcaaaagctgcggcaaaactcaccgcattgcttccggaatccaacaagccaaaaatcttccctgactggttcgtaacctcttctaacaaaccgatacgtcccccaagttgtttcttataccccaaaaggacggaatacataaatccatccttccttgcctgaaacaaatcggaagaaaacaactcctgaacgctcagaacagacttcccgcttgccacccgggccagaccatgaacccagtctgaaatactcaaatcgcatccatgcagggcattaaataccgccgtcgtctgtttaagataactcgtcacctgcccaagaatcacggaaagagcgcgggcattcatcacctcgttcttcatcctctccgccgcatccaattcggctacggcatccctgcccccgtgttccagtcggttaatcaatgcctgaaaaccccggtaatccaatccccctatattagtcatcagcttctgggctactttggaatcactcaaaatcccttgatacctctctacaatctcctgagtgcaaacccaattaacagcatttgcatgatgtttccagaacagagcaagcgccccctgagtggaatccagatacctcttatggtcaaaaatacgggtggaaagaaaaccgtcagacctgcctacggctatcgtgccgtcatcaccaagaatggaagccaattcactatcttcccgcgtctccgcaaccatccagcggagcggagaataatttcggcgtttactgaaaggcaccccgtagcggtcttcgtaaagcggcctgattttatctcccacaagggcgtactcttcaaaaagaacactctttaaagccatccctaccgggcctataaactcttcaagcttagccttatgttcatccgtccatccgcgtctccgcaacggaggaacaaaatcatccatcttggaataaaacacattcggctgatccatgcacatcagcacaaaaagggcctgatcccggctcagcttcggcatgggctggggtgtcatatcataccattcttccacttcaaaccatttccgcgcccgattctcgccgcgtccccatgcctcatactcttccctcagcaaatcaatcgccttctgggaatacatatccaccccccaccagggattctcttcacgtctttccaacagcttagctgtctggtcaatcgtcaatctggtcttcctgacacccttttctgacagggacaaccccaaatcttccggggtgctccacatactcaaaaactcgttgaccttcctgtcagacttcgtattcaacaggcgtttcaacacactattcatcttatccacttcttctgcatgaatggattgcgcccggtcggttgctccaataaattctttcttgaagcgggaaaaaaactgtttccccggcccgtcacaaagacgttgcaggaatctgaccggattatccagccatcccaccatcaccccgcgcttcgctcgtccggtctcactatccacccccaaatcactcacttccatctgggcctgatgaagaccgttctgattcacagccttcggcaactcttccatcagagcggccccatcattcttccatccgtccaccttctcttgcaaatgagcctgccacacctccgcgctacggctgataaacgcacccacagcctcatgaatatccagcattctattcacatccgctgaacttgcggcagaatatttaatccaccaattcagttccccgcaaagtctctgcttttccatcaacaggccgccttccgcttctgaaccgtcagtacccaattctccattccagaacttatccgtcctcaatttctcttcaatcgccgcaatcctgccgctcagctcattcaccctctcctgaacctccctccccgttgcatacaccgcaggtttaattacccgccgtaaaaactccgtaggagcggcccccagacggcttaccttaaacttccgcgtcttctcgtcaatcaccgcttcatgttcggaaatcatacttctcacttcccggaacaactcatcacgcacatacagatcaataacctccccgcaccgctggtataccttcggcaacaggctttccacggtcttacctaccagatcatcaaaaaactccggatgcaactccatcttccggttagccgccgcaagctgtttttccgtcagggcatccgtagcggaaaaacgccctgtctccaatgcggacatcaaataatccaatagcttttcctgccccgcaagtttaccgcgcaccctttccggtagcgtggagacagcaaccttcataatgcttcgcgcctccgcaatcttcacccggacatcattcgtatcagcttcgcggcccctgaacaaagcatccagcgcacggccttctttttccacccgctctgtcacatgtctccaatactcacgcacggcatcactccgggtcttctccatccggcgtttcatatctccaagaagatcttctctcacggaaaatgttgcagatccatccacataatctgcccacgcccccccggtggactcatccgaaaatgccgtaatcttaatatcgttcccgtcaaaaatcacgtaattatacgtctgctcatcttccgccttatggcgagaaaaaccgtctgcatacctgatgcccttaatgccaaacttccgcagggcaagagaagccttcttcatcccctttccccaatccctcgcaaaaccttcgcaaaggccaacataaatctgcttcccggtaaactggcggccctccatcaacaaagactcaagcgcaacctccttcgtacacccgattcgttgcgccaattccccggccaacgcatccttcaccgtctcgctctgttcggaaaacggcttatcccaattcaaaagaacagaatcatccacattcaactccacgcggtaattggaaggcagagcggcgtatggctccaccgtattcccggcctctgcccactcacgcgtcagtccggcattacgcacatactcttgtatatcctcaagctctcttctctcaccctcaacaaggcgcttcaactcctcatccctctccttgcgcttctttttctgggtccgttccgtaaatctggcaatatcccgttcaaatttttcctgatctactgtcttacgcctctctgctaaggcagtatacagattcttcttaaacttataaaaatccagaaaggtcttttcttccttccgtgctgactccaaaaaaattcagccccttgtaaaacgtaggcacatctccttttctcacgcccggaacaaccttccacaactcattaacagaaacattctttccgtttaccttccaaaattgacgcaatccctttccgaactggttcatatacctccggttcaccttctctgactccgcaaaatacaacccccagccatacgcctgcgcaccctctccctgccccatataatccgtagaaaacttccggaaagaatgcggggaagcatgcagggcggcaatggaaaacgtcacccccggttccgtgatgacagcgttgcccgcctcaaaatgcccgtcccggaacaggccccgttcctgtgcttccgcgacagaattgacattttccccttcatttgccatactgttttctgtccgtcggggagtataaacccccattgtgccgggcttagatccggtgggcgttgactcaacccaggctgtcttaaacgtcagtctgggctttttactgtaacgcctttttgtcgtctcaattacctgttctaccgcatgaatctctccatgcggatactgtttcacataaataacggatgacaaaattttttcccttcgggcggaactccatcctgtcgtattcgtccaaaacatcaagaaccagcttcacatcatccttcgttaaatctaattgattcttacccttcttcccgtcatgcccgtgcttctttagcgcgtgaataatggcatcagcggaaaactcatgcaccatccccgtcacatcaatcccaaggccggacttaatatcggcaatctcccgcgcggatgcgccacgatactccacaacgccaagactggtcttatccggaacactgctggaaaccaccatatccacaaaatccatcaccttccgtttcccggcatccttccccatttcatccagcttctctgtcagggaaaaagaagcggtctctctcctgccctctttaacaaaagacaaaaccgtttttgcttcctccaaagttgcccccttcatcaactggaaaaaatctactccggcctgagcaaactcccgttcccgcgcttccttgtcattcgcaagcaaatcattcatcacctgttggcggtaattctgcaaaccgtaccgctcagcgtacatcaaatgaaaaccataatcctgcaaaagcctctccggcttctccctcaattccttcaactgcctctcaaacttcttcttcgtcagctcgctctggctctgtgcgaaatccgctccaacggcatcatacacgaaagatgcaaaatcgcctttcacagctcctgaatccaccgccttccggaatgccccggccagaccgaccatatccgcgaccttccggctcaaagcctccatcacctccaaaaaacgcctcacgggcgcaggcaaacccttcttccggtactctcccgtaaacaccgcctgcatcagcttgctcatcccttcaatcacggccctctccctctttccggcatccaccccatcagcaaaaaagctctcatccactaatttccaattattcaccccctgatccttgaaagccttctgagtatccagcagattccgggaaaaccacgtcaattccctgccggccttcatttcccccttcacatacaattccgccatttcctccaccagatccagaaacgtagcctcaccctcataataccggatcaccttcttgcccatttccagctcataattaaaggcgggggtatgcaccccttcccgctctgccacaaccgcaatttcctcttccgtcacctctccggaaaaaccctctccgcgcgccagttctccgcgtttcaaggcaatctccacgcggtcgcggaaattattcggtaaaacagccagtaaaacatcttcttcatgggcattctggtcatccctgctccattcctttttccggctcctttccgcaatgcgcatcagggcatcatcagccatccttttcaaggcccggtaagaaatagtagtaccctctttcttgaaatccacgccgcacctctccgcaaaataatctacggacgcatcattcaacgccgcatttctcaaggtaaaatcctgattcacagcccaatcccgaaccttcgccgtcaggaacctgtttcctgtctccaaatccatttccacaaactctttcccgttttccctctttctggccgctccttctcttccctccgaacccagaacagaattctcatccttatcccacgtcacggctccccatgccgtctccatatcataaacgcgcagcttcccgttcaccacctccgcacggggaataaccctctcttccatcagggacttcaccagcggaacatccggagtcatcaacacccctatgggttccccaacggtttctgccaccttcccttcaatcttcctgtgaagcgtcaaatcaaacaaccttattttatccctgtcattctccgtattgagaatcattttaatttcttcgtccgtaaaatgtaaccccttcatcgcctccggacactccgcgcactcagccttaatgccccggatacgttcatcagcaatagccgccgcccggaacgggctattcttggcataccgcccataccccagcaacagggacatgggaagggccaccagaaaattcctccatgtcatcgcctcacgggcctccgcatccgcttcatcccagctcttcccattcccccaggaaaacatattggaagccacggaacgggcataaggctcaataactgtctgagcatgcaacactcccccttccagaccaacaaaaagcggcccgcgtccccagaaccggtctgtctccaaagcacggcccagaagccccttcatgccggttttccgcccggcccagttcatcagcttgtcataagccttcccaaccagcttcccgcctttcccaagcccccagatattggccgcccacattcccacgccttcgccgtaagccgcgtttcttgccgtcaaaccatccactcccttagccagataaccggtttccgccgtatcttccgcttccagcaaaggtcccaccccgcctgtcatgataaacggtacagctccaccaaaaacgccggaagcctcttccagaaaattcaccatcccatgagaagaacgtgctttatactgccccatcctcacctgttgaatatcctgcgccaccttattcacccgctgagtccaaagaggatcgtcaaacttctcttccccacgctgagccagcccggcactctgtaaaaaatccatcactccggattcaagccagcgggaagggccatgaaccagcccttcaaccgccattccggaaaaattattcagcatccgggaaaaagcagattcattttccttctgataatccaccagcccggcaatcgcgctgacagccaattcatacgcctgttcatttttccggtgcaaattcgccagttccacaatccagcggccatcctcatatttggaataaccatacgtccttaacccgtcaatccccgtctccatcccctgaacgcgcgggctcctaccgtcttcaccgtacaccatatccttaataaaagccgccgccattcgttggctatccgccagactggccgcgcccgccagaaactccggactacggccctgatgatcatggggatctaaagaaaactccttcccgcttcccgttgccgtcaccatctccccccatacttcccccatgtccttcttcacctgttcccttctggtgcggccaactccggcctgacggcgcaactccgccgccataacagaagcctcatccgtgtccagtcccagccgttcagccagatatacgcggctcaaagcgggtgcgccacctacgaaagactgaacaaaaccatccacaagcacctcatccttctcttcctgactcagacccttataaaaatccaccacacccttcccaagcgtgcgttccacctcattcacctgttcctgatccaactccgagccgtctttcagctctgccatcagctgataagcccgtcctcgcctgacatccgccgcctccgcgacatggccgttccccaatcctctcctgtcccagtattcatctaaagactgcctcactctgtcataatccggactgtccacggacatcaaattaaaatccgccatgacggaccggtactgccggtcattcgtaataacctgccccggttcccagctctgcccctcatcttccacggcaaccgccacattcccggcctgttcatcatccagaacgttcagttgcatttccggccccgcctgcggcctgttcacaatcggaggtctcaaatccacatgcccggattcatccggaacattcattctgttcaactctttctgcccattcacattcaatgcaatattcataaatctattaaataattcaaattaacggacataggcgcgagcctgttcttcatgtagcttcttggcataagccgttgcggattgtggagaccggaacacgcctaaatgcctgcctgtcctcttaaacatctctacagcctcatcatcagaaagaatggaaccgtcatcagacaccgtaggaatcaaatattcctttccatccatgccaatagatatggaacgcacggtgctaatagacccatccctgttcttcacaaccggacgattcgtcaaatcaatattacccttctcaagcagtccgggaatcttctcttccatcccctgaataccatgttcaaaaagcctcttgcggccttccttgctagctctttccgcatccggaaaatcaaaccggaccgccgccttaaacttgcacccgggaaccagacgcaacgcaatagcggccctccgggaaaaaccaaacgcgcggcccggaaccacggcaaccttctgcggacgataaatccggccatccgcaagctcaaaactcacatccggcacatactgttccttcaactgcggataacgtgacaaatgatcttccccaacaataaaacactcatcatcccacacctctttcacatgagcatcccgcacatccgctacgggaatattcatcgtcttcgtcctcacgctcagcctttcatccggttttggcaaggcgagtgcctttttcctcaaatcatccagtccctttctggcctcgttgcgccgcacgaaatccgtatcatcatctttcacggaatccgcatgttccccattttgccggagcagaaaatccagcgtagaagcatgtctaccggtcagttgatacatcttttccttcatggcggtcacaaacctcacagaacttttctcgcccggatgcgccgcctgccactcaaatacccacctccgcatctccattgaattccttttgctctgaatctccgcttccttcttccaacgctccacattaagttccaacccgctctcacgccgcgccatctctctctttttatcgccagttccggcaaaaccggccttctcaatctcaaattccctcaatgccccacgatgccactccaaattcttaagagcatcagcagtaacaaactcccctgttccttccatcgttttcacaacgtcatccacattaaaactgattctgtccgtcttctgcccctgcatggacaaaactctattttcaagagtagattccatagcctcctgaaaatcattactcactccatgatctttccatctccgtttcaactctcccagatacatcatatacgacggagaccccacgccgccatccttcaccagtccgctcacgtctgccgccagcacctcattcatgctgactacgccaatctcttccgttgtcggcaactgtccctcagccgctctaatcctcatcaaatccaccaccggatcagccacgccgctacggaactccggcttctttttccagatgccgccggaagaggaaaaaccattggcaacactcccggcctgctcatgaactccgtctctttcagccattcccccgccctctccatcatcctcaaacggttcatccagcaaaacccggtcataaagcttccggcccccttctccaagaggcatgccggtcacgtcatacaagctgacagtcgtaggaaccccggactgcccctgcaacaatcggccataagaggcaatggccgtattggacagaaccccctgatatttcccgtcaatcaaatccgccgccagctggtcgggattctcgtcaaaatccttggccgcctttaacgtgccaatctgtttccttgcggaagccagcatccttgatgccttcatgccgtccacgtacacgcccaccccggaattcagcacggattgaacacgttccatatctccgctttccacggcggcggcccaatccgcagaaaaagcggctctggccctctttgcgctcaccctccgttgtctatcctgcaatgcctccccccgcgctgaaacaaatcctcaatggcggcgcggtaatgtacagccgcatccggagtcataaactccggttcatccaccaattcccgcttcttggcaagcgtttcttcccagtcctctccattctcaacatcctgttcagcggcggaaatcaatctgcgggcgttggtaagtcccatccggaaactctcatcatcccgcaaaacattctctttgtgcatcaaatcctgccccaaatcatccaccgcccgcccgattttagccgcctgtccaaacacttcggctgtagccaacgccggagccgcggccgcattcccattcacatgcccggcccggaacccgttatctcccatcagaccaactttcataaccctcttagctattcatccattacttgttcaacacctgcccggccttcatggccggaactgccgccatgccaaaaccggttaaagaaagagccgttccggctactgcccctaaaatcgtccccaaagccccgcgcttggaggcccgcgcggcctgcctcgcctgccactctgccaaatcagcctgatacagcgcactcctgcgctggttctccctctgagtagccgcctgagcaatgccatgctcatactgcttcatcagcgttaattcattcatattaccggttccggtggacatgaaaccggatgccgcctgagctgcccgcgccgtactcgcgtcagcattctgattcatcctttgcagatattcatccgccagcgcggaatcatatgcgccctgagcctcccgccgcatattatccgccgttgccagccctgccgctttctgcgctttcccggcctggtactggttcagggcggacaaggctccgccgaccaaactcacgccattgccaaacaaggaaaactctctcgcatggtcacgcataaacccttgaaaccctgtcgcacccgtcgccatataaataaaaactattaactgttaacagaaatcacccctgcatcgtcatccgggtcagctcattcacgcgcgtctgcgccctcttccagtccggatgagaactgtccatataagccttgctcaactcatgcgtgccattgtaaatggattcaagttcctgttctgcggtagcaatggaagccatttgattcacatgggcaaacccggcctctttcatccgttgggaaagaccgtaaaaaaacttcactacctccggattattccggatttccgggaggtcgaacacatgggcatctaccccaaattctacggcaagattgttgagcgtgttattgcatgcctccatcacagccttaaacttgctaccgtaagtctgttgcaactgctttaactgctcatcacaggcatctaaccgcgcccgttcaatctgcgcttccgtttcgttgatgaaggttcgcacatcccccatcacggaagacaaggcatcctgaggaatccccgccttatgagccgccacgcgggcgcgttcaaaaagcttgtaatccagactctcaggctccaccccctcaaacagcccggtagcgtaatccgccaaatccggaaaagcatcgccaccggcaggaggcgttaaatcgccggttccctgaaccggggggagggggcaataccaccggagggagccgaaggcgcaggcgtatcggttccctgtgttgaaggtgcatgagaatgaccgtcattccccagaatcgactgtacaggcacagccccgtcattattgttttcttgtgtttcgctcatagaaaaaattgattgttaatcgttaaaatatgatatttcctctgtattgcccggttcgtggactttcttccagctcacggccatgctgttccagaccagccggaatgcgtcttgtctcatagcatccagcggattccattcgccgttaaaaacgcggaaagccgcctgatgaatgccgaattcaccccggaaccactcttccaaagccttcatggaagccttgtccagcttcccaaaagcatcacatagcaacctcttctgcttttctaattccttatcttcgtcaaattcaaaaggatcatccattgtcatatactgttgcttagttattatccctctccggcagaagattgctccatcatcatcctatcctgcatttccctcaaagcctctttcttttctgtatcattcctgatgaaaccttccgggacacccatgccgcgtgcaacctcctgagccgcaaaatcaaaatcaaaacgggcaatcacgccggggtcaaacttggccatattggcgatagtctcctgagacccgaccagcccggaaagctgaacctgcttcatcaactgggcaaacttggaattgtaaacgacatccggcaaagccttgggattaaattccttccctcccagtccgttaggtatcatcaactccgaaggtacattcggatcaaacaaccctgcatccagcatcaggcggaaaatcctcagcatcataggccggaaatcattcaggtgttggcagaacgtcgggctgaacgccaacagcctttcttccagtcgggcattcacctccgtcgcagtcatttgccctgtctgcgcgccgaacaaatccagcatatccagataaaaagcagaccgcacttcctgacgatccatttccatttcattcatcacttcccgataatcgcccactgtaccccactcagacgggaaaccagcatccgcagcactgacgacagtccagccgcccggcctcaaactcacgcggcccacaagatctttcgtaatcttaagacggggaaaagccttcagttctcccagcgtccgggtaatccttcggctgtactgcaaagacaggatattagaccagcacagccgggccagggccaatccccacggaccaacccatttcaaaaaacgggaaaccatataaggaaattcgccaaactcgccctcttccaaaacatccttgctccctttctctatgtaaaaggaaaaatattctttctctgttaatggatcgtacttttcctttcttcctacggcatggagaatagtaaatttctttttgacgcgctctgtttcatcctcataggcatccttcattgctctgttcagcttctttgcatcaccaagccagcgggccgcctggacggcattccattcaaacctgcgtatcaataaattcggcatgccctgttcatcttccgaaaacacgaaagaatcaaaaggaacataggaaaacatcagcctgttatcattgctgatgccgccgtaataactccctgtgccaaaaccgcatctgtccagcaacgcctgatgattgaccgtataaaaattgctttcggccaatgcctgatacgttctttccgcgcagtctctcagccacttcttcaccgggccgctcttctgtatcgttgacccaagagcggcggaaggttcaaaactgaaccagagctttccgggatcgcttaaaaaactctgatgcgccgccgccagccgctgattggcccgcaccgccgtggaatcatgcaggtttttcaaaccaacgcccagaaaggaaaaattacttggtaacccggtaggggaaaaaggataaacaaacttctttaactctgaggcccagcttgccgcatcctgcttttccttctccaaactgctatacaaagaaacgacttcttctccgtccataactcaacccctgaactgattaacccagcgtcttccggtaactggccccggaagactgaccaaaaacagaactgccagtccctttcgccgtaaaagtcttatcaaatccataacgcttccgggcgcgggccttgacggtattttctgccgtctcgctcgtatcaatgatttccggttccttgaccacctcttgctgttgaggaaccggagccgcttttggactaagaaactttcccatacgcgcaccatgacagtacatccgcaaaaaagagtggatgaagttgtcacacccatgccggacatccccccttatatcaaggcatgtccgcaacgccggtatcgtaacaggacgctgttcccaggcattccatgccaacgacggaactttcaaacccctcaatcaatccgtgacaggccgcctcaataaacatccggaaagcgtccgcaaaatgggaacaatcatcatggtcaatcttcccgttctgatccacatggtagttttccatgcaatccagcaatcccggaagcccttcctcactgccgtcttcaatcctttcgccgcatcgttcatgccagaccgtggaaggaagaaaggaacgcacttcgccaatggacagccagacgcttcccgtcttcggcaccagcctgacatcccggcatccgttctcttccaaagtctgttgattcgtcttacggtcattagtggaatgatgcccgccgtcatggggaagcaaatggcgaaacaccttaaacccatgagcctgctcaaactccctgacccttgccagcatatccagcacgcatgacttcttggcctgaatccctccaataatgcgggtttcccctcccaccttctggaaaaacaccgttgccatatggtcggcaacgccaatatcccaggaacaataaaccggagcataggaatgcaccacaaaccggcacccaatacggttcccacggcgcaactgccggaattgagcgcaataaatagcatcgtccccaatagcgtcaaaagcctcatccggcacagtaggatactcttcccccatattgaaatcagattgcccgttcttccattcccaccacaaccgcgcggattccggcacatccacgccataaacctctttcatccggttgaaatattcaatggtctcatcccggaatacatacccttccggcacgtccagttgataacggctttcctcgtaccacggaaaaaagaaaaaccgccagtccaccgggagaagaggcttccctgattttgacatggcattcttcatcaaattataattcacgccgcttctgcctccttcatgcgtgctttctacgataattgttccgttggtcggtacggattcaaacccgccgttcaccacttcccttgccctgtccgggaaccgcttggccattttaaccagttcggaaacgtgcatgaactgcgttgtgcctccgcgaaatgtattatccgtgtaaatcacagatccgttccggaacgccagcttattagccgtagctgtcacaggaacaatagtcccatccttcttgaccgttcccaaacgcctcttcttctctcgcatcagccacgcaataatgcgccgttcacgctcagccccttccggcacataatccagatgttcccattgaaaccgcactccaagaagttttttctgaccctccggcaacctccaatcaataattgccgcagtcttattcccattccagaatacaaaatccgccatcaacacgcctaccagcgtagaaaggcccaactggcgggccttcaaaatagcattacgtccatgttgcctttccagaaacttccgctgtacttcatttggtcggaaaggaataacaatgccgtcaacattcttgatccaatacagatgttccagccgccaaagccggttattcagcctttccttccaataattcagaacctcctgatactgtttctcttccctctccataatcaaacaaatcttcaaagaacagcccttgaatgctcacatcctgcttttccggagcataatcacccgtcatcttgttatccaaatcaatcgccttcatccgctcggcatgggaaggcggaacctcaaacaaaaattcatcaccggaaaacaacgcttttccgcgtgcaatttccgcgagcttgagcctcttttctttcaacgtcaggcaattttcatcacaaagacgctcacggattttcctgatttcttccttgattcccggctctttcatcttccgggaagccgccgcctgcgcggattcattgctggtgcaacaaaaaccggcctcaatataagcctgatacgccatcaatccggaggccactttctcgcaaaaaatatggtcacgctcacttaacatttcctaacaataaattacattccaacaacttatatcaaatcttgtaaagcctcactcttcccggacttggtattctcttcttctcgtattctcccgtcatcccccagggcttcaacattcttcttctgggcaaggcaagccatcagtccatcaaactccccaagacattgtttcagggcatcagaacctttctccgtcaaagtataaatatattccacctgaccatgcccagaagaccggtaaggccgtaaaatcacatcatcctgttgtctcaggcgttgaagaatctgtctgacggcgctccggtcatatccggtttgagtaacgatttccatacaggtttgttcccggtctgccaaagcaaccatgaccgttaattgaccctaattcagcgcggacaaatgaacacgcctgaaaaacccgcgtaatgctcgcaataacatttccatgcgggaatctttagcacagaccggaaaggaaaaaatagagtcttatcggcaccccttccaaagaataggccagaaaaacgggagagagagcataaaccccagcttagctcatacttgcgccaaccacgttacaaacgtctaaaaactctcctattggataatataaatggataaatcctgatatcggagcatggcgaaaatgataacaaactcaaaaacaacaaacaggaaaaacacagcacaaagaaatccgtcagaaacccggcgcaaatccattgaaaacacgcgcaaaaaactattgccgcgccttgcccgtttccgtgcctgcttggcactcgcaaagcccccctcagggccttcactcccgccaacctgaaattgacaaaatatgtgtgtcatactattttttatccccctactatctcttattttgttcgagttcccttctaaccatagatattatacacagaacgatgaaagatactctggcaagtcagttattaaaactaactgtattaataaaaactaatacttcttcacaagtcagttcttatggaacaggatttttattaaaaagaaacgaattcatatttttagtaacaaataaacatgtaattgaaggatctgaaaaaatatacataaaatttttttggacaaccagattttaccctcatctcagaacaatttgtatcaagtgatgactacgatatttctatctgttggcttattaatatacccgatacagtaaaatgtatttcagagaaattcatcccttcagaagaagatattgaaaaactagatgctattgaagacattatatttattggatatcctaccggattgtatgatgaatacaaccattctcctattgtcagaaaaggaattactgctactcctttatctataaactatgaagataaatcactgttcctaatagatgcctccatatttcctggaagtagtggaagtcctgttttttgtatattcaatggaaatataaaaataaacaaaaaaggtatatttgaatgcaaaatagtggatttcttactacttggaattattgcgcaagcatatatacaaggacaaaaaaaggaaacatgtttatccccgacagcaccgcctccccctgttgtttatcgtcagatgattgatttaggagaagttataaaaacaaaagaaatcataaaactcatagaaaattatataaaccttcatacaacatgcgaaacccgttaaaggaccatgtaacacccttcttaatcatcatcattgcccttgcttatttcatgaaaatacacaacaacctgctatgaatgacagtcttttctgttttccgttattctctacggaaaaatgtcaggataaaaaatgtcagcaatgtataataacatcacccattatgaacgaacatctctactcattccttatccttctccctactgcccttttcattacaacttactactacgggaaaaaatggtggaataaaaaatgccaacagcatattgaaaaaaaaagtaaaacaacagctcgctaaagcccctaggcgcacgacattcccaactattcccggtatgaaaaatcctctacaggaagatttagaaagggcaaaagacacctcacccccgcttaccccaacaggaatcctcttacgcaccccggaaaatgatctcatcagtcaattaaagcaggacggccaaaaatctttagcccatttcaatcaatatctagaagaaaaacaaacacaacaaagtctagcctatgaacaatacatcggctacctgttagagacaaaaggatatatcgttttctaccgaggagcaacttcctgtctacaggataaaggaatagacctcatcgccataaaaaatggacacatccgcctcatccaatgtaaatgcttcaacgaaaatattcaaaaccatcaaatccaaaaataccttggacatatagcattcgactggaaatttgcaccaaacgcccccattcatggcctctcccacacatgggaactctattacaccccttggcttagcaaagctgcataccaagcctgtagagataaccacatccaactcactaagcagagtgccggtattgcccctccggtcaaagctttccattttgaaggaaaaaaacgctacatgctacccggccagcaattttatgatcacatcatcagctatatagacggtcaggatcacagacgcttttacaaaccggaagacgcggaaaaagaaggattttcccgtctgcaactcattgacaacaataccgtcaaactcatcaatgaggaaactgtcacagcatacgttcaagcacacccgcaaacacccttggaaactctcacccgtccgtggttggacttttaaaataagaaaaaatattctaaaatcatctttttacaaaaatcgaattgacgataaatgattacaggttatagtaaccagcagatgccaaaccaacacgatccaagaaagcgaagtcttgctgtatatatctcacgtgaacgctactaccaagttaaacgtttggcggcgcgtgaaggtatcagcatgtctcgcctgcttgaaatccttgttgaacaagccgtccgtgatattgaattaacaccagaagactatgaacaaatcgcctcagaaattagaaacgctcgatcagggaaaaaagtcgattaccgtaaaactaaacaatgatatttttttcaaactgaaagcattagctgaaaaagaacatcgatcgaaaagtgcacaaatttgtttttttatcgaacaaggttttagtaacctagaatatcagctaaatctggaacaggcgataaaaaataatcgcaggttttagtaaccttattttttaactgccctgacatttatgaccccggaagaactcaacaccctagcagaactcgtcacagaaaaactctgggacaggttcgccgtcatgggtgcaaccggcatcttccgatccaacccttcccctgccccggtgacaacgccggatgactacatttctacggatcaaatcacccatgaattcgggtgttccaagcaatggctttccaaccagcgcaaacgccatccccaatgttcccgccttgttaaaaacaactcttacgaccagcgcggaaaacgcttctggagccgttcttacatcaaaaaaataatccatgaatcagaggacttatgaatgcaaatcaacgccttatcctcaatctggacaccaaatacagcttaagcacctgctttccttgccggaaacggaactccggaaacgtcttgttcatatgtaggaattgcacagcaaacagacggtagtgttcaccttacccagcgcggtaaagacttgctgtttattctggcgtgctatctggacgcaaccatcacggaatcagctaataactaatctgccctgtgaattactcacccgttcagcatcatcacacccagagccgggaatttaagtctgcacggctctcccaacgcggaatctggataacccttttgcaatattgcaccagtcaggaaaacaacggaatcattaaaaatttcgcttcttggaagcctgctgaaattcggaaaacgctgaacgtagatcccgccactctccgaaaaaaatccaccctttggaatatggtcggggaagacctgcatatttacggctatccccacgacaaacaagccatacttaacaaaaagcgtcaaactctggccaacaataccggcgtgcaaccttccccccggccggaaaacaatcatcccccgtccccggccggaaaatcggaaaacaaaacgccgccgctcgcattctgggcctttctgcggaacacctgcgttatggatgcttggcaaaacaaagacctcaaccaaaaagaatacgccgccgccatacaggcttaccagcaaacgatcacatgcggagaccgggactggcaactactgaaagcttactataacggatattacaaacgcggccagaccagagacagccacaacaataaatactactgtccggcctcccggcttaaattctacgaagacatcattgacgtgctgaccaaggcggaattatgggcgaaagacacgcgctggaaaccaaaaatttccccggccaacgcgccgccgccacaacgcaaccttgccatccctcctccacaggaaacggacgttcccgttacccccgaagaacttaaacaattttttgacgaaataaacccgcactaaacaactggaaaaatgagatactacatacacccctgcaaactccgcttgagccgcctatggatttttgacgacggtattagaagctgttgccgcgtcgctgtcaaattcggcatccgaaaacggcatgctgtcaaaggaacatctgtcaccatgtcccccggagaagccagacaggaattaaattctatggaaaaagccctgtttcaggaaggtttctggccgctctggctctggatattatgctgtagtgcttatgttatcacggcgatacaacttttatcatttattctcaacctttaacgctatgtgccatgaacattattcaggcttatttaaccatcataagaaacattagtcattatctgccacaccagaaaaatgcctacaggaaaaccgccatattggcggccatcgcattaggccatacaacccccaaaaaaatatccgatgccgtctacatcgaccaagaacaaataaaaaaaatagcgaaacagcttattcttgaaaaaatttcattacctgcgaactcctttctacttggccctaccgaaataaatacgctctaaccgctaaaggagaaaaaatgacaataaatcttatgaatcatagaaaaaacacttcattctaaatcatgaatgccaaaataaaagaacggcccatcctgttcagaggggacatgatccgcgctattgcaggaatacagcatgcccggccagtacaagaaccagacgcgccgcacgcacggcctgaaccggtttaatgatttccctccatacctgaaagaaaaaggctggaagattcaggaattcatagaaaaaagtcccggctggtggctagctatctccaacgacgaagacggggaattcccggatatatttgatccgtgggtaagatgcccctatgggaaagcgggtgatcgactgtgggtgaaagaaacttttttcgaggtgtacgatcaattccagcccaccgggaaatattgctacgccgccactcaacaaggttatgtaaatgtcttggacaacgacggaggcatcaaaattaacaaagatggctcgaatgcgtcaccatggaaacccagtattcacatgccgcgtcgggccgcccggattttactggaagtgacggaagtaagaattgagcggctgttagacattacaccgcaggatgcccaaatggagggcattgaaagcgtctggcacgacgaaatgactgatgcccacttagggaaggattattcaggaagatctacagggcatatttttgcccggatgtctttcttttccctgtgggataaaattaaaggaaccggatcagctaaaatgaatccgtgggtatgggtgattaagttcaaggttttaacaattaacggagaagtgaaatgaaaacgcctaaatgccctatttgcggaacagtcttgcaatttttccatgaacttaaatttggagggctgggccgtgttggatgctcatcctgcgaatgggtaacttttttagcgtctccacctcaggcttggaaggccgccgaagaattcatttccaagttcccccctatcatgaaggtctgtccgggggataaggtgaaactctacgaagaccggcatcctaagaagatcattggaaagaacgcagaccgggggctcctttatctggaaacggcttccgggccgcctgaacccgtgcggcatgacgatgtggagctgtggccgtgggagattgagcagactgagaaggtcagcaaaagttgtgataattgtaaatactgtatccggcctggctataagtctccttgtctcgaatgcgtagattgtgaggatgaagcttataaatattgggaactcgatcagaaaggaaggaacgaataatgaaaaggaaccctcacgttatcgttcagaaagtttgcccgtgcgccagaacaaaagacggaaaataccgcgttctctctgcaattgtacgccacaagggactcatagcccgcttttgcgtagagtaccctaccaaacggcatgcccggtgggcgcagcaccttatttgcacgacaaaaaatcatacacgtctgcgagtatttgatgaacttaaagccttgattgagaaaggaggaagcaatgattaacatcctcttatccatcaaaaagcttttttctgtctctaagaaaaatctccctcaaacaaaaaagaatgaaaaggaatttgttttcaagccgtgttgcagaaattgcattaacaacgccggagatttcgagtgttacacctatggattatttaagactcccgaaaacctagatgatatttgtcaggattgggaatgttctgaagagggaaaagaagaacaggagtactattttagaactaagtataaaagcctctatgaataaacaacgccgcaaagaaatagaatacctgcatgaaaacctccaataccttcacgaaaagctggaaacgctcatggaggaagaagagcaatctgaaaatgccatttgttccatggtggaagccttagaatgcatagcgggagccttaaactatcttgaagaaatcgagtaatcctatgaagaagacaagacaatttgacgacatcaaaaacggtgaactgatacgcttccttgttaagccttcatcatctccttacgaaaaggaggtaaaagcactcgaaaaggaagctaagtcccttagtgaaaaactgagagaaggggaaataatcatgtttccggaatatcctttgcctgaggattaaacgtctgatcaatcatgaagtctggaacgataaagaagaaaaagtccgtaagaaggaaaacggcggcaccgaagacggttgtccggaagagttacatcttacgcaagcggcgcctgctgagcatgctttggagtcgcgtgaatgagattgaaaagcacgtgcctaagtctctggatgaagccgtggagttatcccgacagtcccgaagatggaggaagaggttggcaaggtttaccaaattgaaaacaacggcatttccggcttatgcgctgattgtggattgctggggaaagtcacttctgcttggggctggcacccggaagaagatggaggatctgatcaacggttccgaatcggtcaggaatgccgggtataaactggtttgcctgagcgagctgatgacaggctccacacagattgatgaaatggcatttgcacaagggaaggagggggaatgaaatgcacacgctttgcgacggacaaaccttggaaatcaagccggatgttgtcggagatttccggaagatgcctttcagtgatggggcatttcgtctttcatgttcgatcccccgcacctcattcacgccggagaatcgtcctagctgaacaagaagtacggaaaattgaaccgaaagacctagcaggaggatttgaaggctggattcagagaatgctttcgagtgttggaaccgggcgaccggacggcattctggtgttcaagtggtgcgagaatcaagtttcaaccgcagaagtgctaaaactggccagctggaagcctttgttcgggcaccgccgtggaaagaccgtttttctcgtcttcatgaaaactacaacccacgaatagagtgtatacgacttagaacactagaattatttttatgcgatttatctatactcttggttctaaacctcggagaactgtcaccttcaatattgctcctatctacaataatattcgattttttaacccatttgttattaacacatttaggaacaacctcagctttaacaacgaaaccatacgaagtttcaaatttaacaacattatctccattatcttttttatgatatttcaatttaatttttctcatatttccaattattttttataagaaaccatatacgttttctcaattttatgaaaaagcataaacaaatattgaaatgattttaaataattatccctcaatttatccaaatctttatttttaatatattttttattacatccattaaccaaaaaagaaagctgaagtagtccaatcatactttttttattttcctgtgttgagcgacttctacagcatacaggaatgcctatatattgtagatatttttcttttttattttttaatttgaaactcgcatttacttctttctgattatacaatgtgacaatatttggattatcttctctgaataattgtgcgtcatagcattcatccgactcgagagaacgcaatttttccaaagcattacaattagctttcttattacatccaatcataacaacttgtggcttattctttcctaaactgggctctatccatcgtattacatatgatacctccaaagagatattaggatacatttctataatttccgaatgaatcacttcacacaatgaagaggcaacagaactcatactccaagtcgaactcctatacttaccttcattttgaaaatctttcgcaacttgattaatagaacgtgcagaatcataacaaaaagcacttaattttgttagtgtgtttttatataatttagattttttcacaaaatcatttttataaaaattattggaaacaataataaaaaaatatataacaataacacaacaaaaacaaatcacccatattttattaaaaacattaatctgccccattacattaaatagcaatcctgctatcaatgtaccaatcaaaactaaatttgatctttctgccatatcatgtaaatgaagttaatataatcactaaataccccaaaaaagagcctattatgacattatatcttagtcaagacatttcaaaactttcgaatataaaattcgatgcgagacaaaagacacttgaatatcacatcgaatactgccaattaatcagattaactatcactccaaatcaattacttgcgcaagatatacaaaaagctactaccactaaaggcctctgtatatggacaccaaaccttgttcttttcgcatgggaaataggagatcaaacactctggatagagcatgccataggatacctttctgacctgattccgttggcatcagcctacggcccggaatggatagtccgctaccaacaccgcaacaaaatacgccatcaaaatatgtaccatttactaggtagactataatattatttgtgtaagaaattatgtaaataaatcataaataatttataatcaacaataatataattctaccgaataccatttttcttaaaaccccgttcctttccggacggggtttttcattgcctccatccagtcaatagacatagcatcagccttcccccgtaacaggctcaattgaaaaatgcaagcataaagagacggttaatgcagaagtttgcgttgataagaaaaaataccggatatctccctctttactcacttacagtgaaagatatgatgagcatttaacctcattagtctcccatacagggaaaaatgtttttccaactttttttgaacacaagccccttcccgggacgctaatagtaggagggcagcttaaggccccagcccttaccccctccttccctgatgaaacaatgactattaaaagcccggcggaaagcattccgccgggcttgctttttataaggctccgccggttaaaacgtccgggaaattaacgggtagtcaaacgatcatataactcattggcatatttatgattgggatggttcacattcatatacgcctcataaagaggatgggatggatccgattccatccgcatggcttcctccgcaggggaaggcgccgcatttcctgtatgatggagaggagcttcatcaagcaggcgtgatgcctggtacaacaggcggattgcatccggattggaaccgagtcccggattatccagtaaagcgtccgcatccacccctgtttcagaggcaagccgccgaagaacggcggcagccctgcccatgttgcgttcataattggcaccccattcctgctgaagggattgttccgcctgcatttccatctccatccgggcatcttccatgtgctcacgggcctcgttatatgcctgggccattgtctcctgaagagcattcattgcctccggcggtactccgtaacgataggccgtgcgggccatacgctctgccagcccggcattccattcgctttccggcgtggattcaggacgttccagacggtattcttcctccgactccggcaatccggccagtaagcggaaccgcgccatctgttcttcattctccacaccgggataacgtcgcaggcgttccagctccgcgtaactcttcgccagagcctccggcgtcttaaacttggaaagagatttctccatccctttcaactcatcaaaccgggcgtaccaatccggagcaaaacctccgtcctcacccagaaggggaggaaaaggttcagtttgaactgcggtttcggacagcgcgtccgtctccggggaaacggccccggaaccctccgcatccctgaaaggagcggccatgctgttatcaatggaatcaatcatttttctcttcttctgtggtttctttaatggctaattgaagctggcggcggatgtacagaaagatctccctgtaggcatccctcctcatggcgtccagaggatcgtaattccccggacttccttgaaaaacgggcaaatcagtctggaaacgggcttccagaaaggaaagagtctcacgcccgtccggggtgtcaaacacccggagaagctggcgccttttgaaacgggcctcccggacggaggcctcctgctgcaatgtcgtatcctggttcatttctgaatcgcggttaactggtcaagcaagggattgagggaagcataaggatcctcttccgccggagccaggtaggctccctgctgaaggtccgcccgttccttccgcatggcacggacatcggcccagggcctcagcatgctctccggggcgccgtccacacgggcggacaggcggaaacagtggtcccagtccacatgatccgccaaatccggggcagcctgcatcatcatattcagccgctgaaggctgcggtccatcccttcactctgcaagcgcctgagcaccagggcaatctttgactgatagacaaccctgggttctccgacggcaacggagccgtccctccctaccctcaataccgcacggggtggcctgggaaacttgcccatccggaacagcagggaaaaaatgcgtgtcattgtggaatacagatcactcacaaacagcgtgaaggaaggagaaaacatcaagacgcgctcattctcccgcgccatgacctccgtggcagtcatattgccgcggtgcccgctccaaagctccagcatgggcagataataggcacggcgtatcgcatcctgcttctgtgccagacggtccatcccaacatcatacctgccctgcgtagcccattcccggggaaggtgaagggaagcggcctccggggtaatgacggtcctgccgccggcccgcaaatccacctccccaatctggttggcgagctccagaatacggggaaaggcggccacctcgccaagagtgtccagaatacggttcaggaactgcacctgctggatggcgggaaacaccagcctgccgggagccagaccgtacgggccgctgccccacttcaaaaagcgggttaccagataagggaactccatgtatcccccttcctccacgatcacctggtcgtccagagacaggtaaacgctttcaaacggcatgtgggaggcctgctccctgcggcggctgcgccgggtgcgcgggcgcaccacatgcagaaacctcagagttgtggcatacggattgcctccgcgctccagaacttcccgagccttgggccccagagctttcaccccgaacatggagcgtgcctgatgagccgtgtaggtaaactccctgacgtaggtatccacccggccttccgcattctccgcacaggcgaactgtccgcacggaatattggtaaacaacagccttccgtccgaggatgtgcccgtaaacagacttccggtccccaaagccacccggtccagaaaacactcatgaatctccgtataaaaattggaaacggacaattctttcagggcaatttccgaacactggttataccaggcctccgcctcgtcgcctccccggtcatccggagccgaccacttgaaccatacgtcatggctgggcgtaatataggacatatggccgctggccagcttctggcatgcctccacagccgtagtatccgtcatgcggtccatagcgtccctgttgggtagggaaacctccccttcccgattcaggcggcgaggcagcacgtaatccctcagacggtcccaccacgtttcccatggcgcgcgctgggcggccaaggacttgtacacggaattcaattccgcaactctttcttccatggcaacgcctatcccagagttttcctaagcagagtctgcggattaacctccccctgcccggcggaagaatgacggcgcgccagaatggtggaaatcattccctgcctctgccgttcccgggcctgataatcttcccctacttcttgttccacgctctccgccttgaccgggatggtctgctctggagcagaagcggaaggtgtggacggtttcataaatcccataatttcttttgctttctattcatggttgatactgattccccttcccttctgccggatataaggctccagaggatgccggacgcccgcctcacagacaatccatacggcgggggcgtccttttcccatggaaggaaagggaactctccccacctgcccgggcaatccgggcaagtgcttgcatttatcaaataaacaaatcggcaaaaaatgcacctgaggaaaaaccggacgcatacatgccattggtggcatcaaagaggtcgcctccaaacgtgatgcattccgcatccgtttcctccaaaacatagggcgctatgatcaatgaatccttacttcagccggatacgccatccgcgctggacatctgcaacgcggccctctccaaaataggggaggcacctctggacgcgctgattgccaatgaatccacggcatcccgcctttgcgttcttcattaccatccggcccgcagggaaaccctttgcatggcgcgctggaccttcgccgccacgcaaaccactctggactccgtttccgcacaggcgcccaattccctgaccccctatcaattcacgctgcccgcagactgcctgcgcgtgctggatgtggaatgctcggaatggaaaatgcagggacgccgcattcatgcttcctgcgccccgctgcccctaagctacattgccgatattgaaaacgccgaccaattcgatcccctcttcatggacgcactggccacccggctggcagaaaaactggccatgcccttgacgggcaaccaaagcctgcgccagaatcttaaccaggaattccataaaatcattcttccgcaggcggctaccgtcaatgcggtgcagtgcttttccaatgattcccacccgctgctggatttgctgagaaaaatcaaatcgccctcttgcccggaagaatgtgaataacatgagaataataagcaaataacataataataagttgtgaatacatgctcatgaaagcactggatttcatacagatatttgcctccaacgtccgcaggctggacttccgcctcagcagtgcccaggtcattctggccgtcattgccgggtacaggcgccacagcaccattacggaagccacacggctgcaccctaataccgtcaccaatatcctgcaggatctcattgcgcagggatatgtcaaccgtattggagacggtcgcccttatgtttaccggcccactgcggatggagaacagcttgccggaaacctgctggacaaaaatacattccccggcacatgaaaaatcccctgctcagtacggaagaaaaacgccgctggttggcccgcgttttccgggacgaggacggagaatactctcaggcggacaaattcaaagcgctggtggaagacaccaaactggcagccctgcagcaggaagaggaggaattcaaacgccagcgggaaatgggcgccgaaccgcaggaccccatcttggctctgctccagtccctccccccggcagaactcaatctcaataatcacccctcttcctgacaacttaacaagatgatggaacaaaaaagctctctagaccaaacaagttcggagagctttttcttttccagataagttacgtactccctggagagtacggcgggtggcatcttctcgaagcttgccctcgtcatgtttcaatccacgcactcatgagagtgcgactcctgggcgtctatggcactgattatcaacagtgcaacgggcgttttgagccaacctcccatgggaggtacaaagattccaggtcgtaaaaagagatgatagttgtcaagatcagaaccccaacggattacgaaaatcgccggtattccggaaatttcctgtgagcttggggtcggcggaaggaagaccgggagaggagcttttcatacgttaaaaagcccgcatctccggcaaccagggcctgtgcacgaagcagaaacatcctaacctgttccctctttcccgtccagaattttgtaggcctctccccggaaaccgttttattctgttttccacaaaagaagaggcaccccgggatagccgtggtcccgaagcgccctgcggaaaatatccgctgtttacatgatgcttttgcgcgtccacctgttcaggctcaacagccataccaacgccgcggagatagcggaggccagacaggccatcaacggaattttcacggcggagggcagccctcccagcccgatgaagttcacgaagtcataggagcactggacaaagaagaagtggcacagatacacgccgaaagtaagcgccgccaccttgctcagcactggaccagccttgattctgagcaggctgacgacggcaaagatggcaaaggtcatcaggaatacattgattccggagaaataccagagcacttccagcttggaatactggccggggaagtgcttctgcgtttccagaaagccgaagaatgtaacggcaaaaccaatcaaaaagaggggaatagtaatggacagcgtttttttccagctccaggccagcgggtatttggtcaggtaatgcgccagcaccatgtatcccaggaatccggaaaagttataaaacataccgtacggattccaatcgcaaacacccagaatacccatgttgccgtaattgccctcataacccagtgccggagcaagcatctggatgtaggggagagtcatgctgaatatccagatgcccaggaagattttcacatctttcctcctggcttgcgtcagccacgcgctcatgatgggcatgaagaggtacaggcccaccagcatgtatacataccacagaggcgtggtatcatagttgaagttgaagaagaaggtatacagcttgccgacggtggcgctccaggtataagtgtccatcacgatgttggggctggccgtttgaacgcctgcggcaaagtatccgaagtagagcaagggaagcaccagtgaccagacaatgagcggaaccagcaccctcttgaggcgcctggagtaaaaagcgcccatttccaaggtgacgggaaagagcaacactccggagatcatgacaaacaaaggcacgcacggccgtaccagacttccccagaagacagcggacttaaagttgaaggaaccgtcaaaacttccaacgaacggatcacagcaatgggccaggacaacgaggaagcaggccaggatacgcagaaaatccacccaggcgatgtggctgccgcgagagttcaatgattggttggtgttcatggttacgtgggaaaaaaagcgccgcgtcatcgcaaacgttcctgataatatacccgtttcccggaaacgttctatcatcaaatggagaaaagaaacaaaaagcccccaatccctccctcccggcaacaggggaaagctcttcgggaaagccagcgcttcctgcaggcttccacgcctcttcccccataagaatcacggaaccttttcctacaccaccggaattgttcaccgtgaggcctggtgaaagttttttcattcggcgaagttcatatttcattcaacaggatactcctcttccccccttgcaaaaaaaactttttcccctcctttcagtgaagagctattccgaaacggaaggggaacacccccaacacccatgttttccttttggaccggcaggaggatttcccttcatttttatggctaagatacccggaagccgggattcaggccttctctacctttcacacgctgtctgttttaaaactgcccggcggcgggatgagattgccgtagcggtgaacggtttcggaaacaacctgttcccggaaataccccagcagttccaaccgaccattggcaagcacgggacggtccagcacttccacatcccgggcacggacggcattggccagagcctcggaaatatctgttccacgcaggaaccgtacgccttgaagggcttccggcatccggccgatcaattccgcttccgtttccaccgtcagggaagcatagtaaccatgcattttctgaatccaggggcggctcgtccctatgctcaggtgcaggagcaccccgcacagtttcgcccccagcagcagaatggcgacgtcatcgtcggacatgttttccacacgggccagaattcccttcaccgggatatagcggaaggtattattttctccgtaaatacgggagggatcatgatccacgccgaattcctccatccaccacttggcctgggaaccggccgcggaacggatgcgcttggcgcagtccggcagctcggaacacagtttttccaccagtccggagatacgttcacccggcgtgcgcaacttctggggcagtgccttttcctcccaacttcccagcatggtaaggtagttgggacctccggccttggctccaggccccatggaggaatggttccacccgccgaacggctggcggcggacaatggcgccggtgatgacacggttgatgtacgcgttgcccacctgcactttagttttccacaaggcaatttcccgttcatccagggactgaaggccgccggtaaggccaaattcggagtcgttctggatgtcaatggcttcctccaggttttccgcacggatgattcccaataccggaccgaagcattccgtctgatggaaccagcttcccggtttcacccccagccggatgccgggagaccagaggcacgggttgtcttccgaaggttccggcttgagcagccattcctccccgggttccagctgcgtcagcgcacggagcagattcccttccggctccctgatgagcggcgtcaccacggagttgacttcccaggatccgcctaccttcaggctggcggcggcatccttcaactgacgcaaaaaggcgggattgtcataaacggaagcctccacaatagccacgctggcggcggaacacttctgtccggaatgaccgaaagcgcttttcaccaaatcctttacagcctggtccggatcagccgtagcagtgatgatcatggcatcctttccgctggtctcagccagcacatgcaggtcaggccgcagttcgcgcagcatttttccggtgcggtaggatcccgtcatgatcacaccgttcaaacggggatccatcagaaacttgcgggaaatttcattgcgcggcatcggcacgaattgaaggacgtttttaggcacaccggcacgccagaacgcctggacaatctgccaagccgtataaacggccagttcggacggtttgaacaccacggcatttcccgccatcagagcggcagctacaccgcccgtcggaatggcgaaggggaaattccagggagacatcacgcaaatggtacccagcggggacatttccacgccgtcgttcattccgtcgcggtccaggccttccgcgtaatagcggcagaagtctatagcctcgctcacctccacatcagcctccgtgggcgctttcccggcatccctcaccatggcagcaatggcttcccccctgattctggacagctcctgcgccgcccggtgcaggatttcagcgcgttcgccaatgcttttggacgcccaggaggagcgggccctgtctgccgtgaccaaggcatgttcaacctggtcaaagtccgcataagcgaatttataggaaacttcattatggcgggacggatcgcgccccacgccccatagattagtcataatttcctcaccatctataaccagagggatttcctcgccggatttttccttctccgcggcaatcagcccgttgatccattccgcattctgccgcagggaccagtccgtatcccgctcgttggcaaaggcgtcccggtaatgtgagggctggatgggatccgcagcgcggttctgcgtgcggttggggccgtacttcacctcatccttttcctgacaagccttcaaaaacctctttttctggacctcccagctccgggaccccggtgtcatgccgaagagatcatgcaggaagttctcctcactggtattttcatccagtctccgaaccaggtaggcaatagcgctgtgaaaatcttccttcaaaaccacaggggcataaaggagcagaccgtccgccgcctggcggatgacccgcgcctgatggttcgccatcccttccagcatttcgaattccacctggtcacgcacgccttcccgctcacgcagcagcatggcataacacaaatcaaacaggttgtgggaagccacgccgaactgcacatatctggcattatccggcatgcagccgtaatggagcattctcttgtaattggcatccacctgggctttcgtgccatacggggcctgcgcccagccatgcatggaggcctccaccttctccatcgccaggttggcgcctttcaccaggcgtattttgatgcgcgcccccccctgctccacgcgttccttcgcccaggcgcacagcttcatctgctcctcccaggaatccggcaaataggcctggagcacaatccccgcctccagctgcatgaattcatcctccatcaacgtacgtttgaacgcttccgccgtcagatgaagatcacggtattcctccatatccagattcacgaacttgggctttctggaaccgtccggcaacgttaccgcattggtaatggccgcccggtacaggatgcgcaggcgctcctgaatcaatttgacggtttcttcaaaggctaccagatgaatctggctgaaaatggctgaaatcttgacggaaatatagtcacagtccttgtctgtcagccggtccacgacctgctgaagacggtggtgcgcctcgctttcacccagaatggcctctcccagctggttgatattcatccggatgccgcccttgcgcctgcggcgcaggtgggggcgcagttttccatcctcggcaggaagaattacattggagctctcctgtctcaactggctggtaatcatgggcatgactacacccggaaattgagcggaaaatctcccccccattttcatggcgaaacggtccgccgcagacaaataacggggaacgccatatccgtccaaaagatagcggaacaactcagcaccccgctctggagaagaaggacggaacacacgatccgccagtgccagcgtaaacgccttgcccgccggatcattcatcatgcgctccatttgctgcgcctgcctcttctctttccctctcatcccggcattcgactgctttaaaatggactccgccagttccacagccttggcggccagttgctggtcagtccattggcctcggcgagcctccgccatcatgtccgggatggatgaatctgtcataacggttcgaagactagccccgggcaggggcaaaatcaagccaatttgcccggtccttcctgtggaaagaggaatcacggaggaaaacgcatcccttgattccgtgacggaagcaggggagccttcctgtccatttccggcaactcaggaaagacacattaatcataccgcgcagccgccagacgggctcttctcagctcttccctgagctggtgcgcccgtctgccgcaaacgctggaacggttcatgtcccggacctcttccaaaaccgcaaccgcctggttgaaggcatcctcgctttccggagtgtgggcttcccggtacagaacctcttccagccgcacccagaggggatgcaccatggagagcagaattaactggcgctcctccacggataacgagggatcatccgcgcaggcacgccacgcttccagacatgttcgtatggaagaagctttgcaagcccggaaagactcgccaagcaattcggccgttttcctgtttttctccagacgaaaggccgcctcccgggcgttaagaaaagccggaaccgtacagttcaatttttccagacgcttcatggtgccaggataatcccgaaaccaggcctccggaggcacctgttccagctcccggcaaatggcggaggcttctgccgcagggtccccgcccttcggaatatcattcacccgcgtcaccggccgcacacgctgcgctttttccgcaagcagggacactttttcccgcagagaagctgcagaggaccctccttccaccaggtcgaacacacgtcctttggagtcaaagaaaaccacggaaggcagcatgcgcacaccatgcatcgccgcacgggacaggctgccgtcttcttcccaatccttcacggagggatgtctgggaaccgtgacaaactgcacgtcacgcacatattcatccagcgcgcggcgttcttccgtgcccggctggagcgctttcaaccaacgggcttccgctgaaccgggttcctctgaaccgtacacaaccagaacaggggatggaagggagggagccgcagaacaggagacggaaagggcatccatttccgcacgtcccggaaacgccagcgccaaaaatgcaatgaccgctaaagtcctcatgaataaactgccatccatcagccctttctgatggtaatgcgcttgtaacggctgtccccttcttcggactccgtcacaattccttccatggactgaagggcattatgcaccaggcggcggtggtaggcattcaacggaggcatcttcatcggttttccgctctcctggacgcgttcggccagggaatgggccttttccagcagacgggcttcgttgcgctcccggtaatggtcgcaatccaccttcacgcggggagcatcttccatcttgcgctggatcatgcggttgaccagatactgaaggtcatccagcctgtccccgtcacccccaatgatgtactgtgaatccggggaggaaatattcaggcacacgatgccgtccgtttccgttacttcgatatccgcggaaaaccccagcgaagccagaaggctcttcaaactctgttcagctatttcttgcaccgtcattactttaaattaataggaaaagggttccataccggaaaaaccgcctcgcgccggacggtgcgagccttttctccaatacccgattgacataaaaatcataacctatttattcccctcgtctatgaaaatttgtggaagttccgttccatatcatgtacgcaatgccgtccctgccctgccgttccggcaacacggttccgttcctccttcggaaccagatgcaggaaacaccgcttaacaaggaggccactgttttccgcctgcccgcggctgtaccccggttatctccgcttctccctgccgcaaatgaaacacaggctgcaggcatcgcagccatgccaatcaaacaggcatttcctcacagcccgttctttattacataaaatattaatcaccagtttttataaaaatttttcatccgctccggagaaatactgatgacaaaacaggacggaacatacccggaaaaagggaagtcgaactattacccacatagaaaaatccggtccctcatgaacaagccaatgaaaaaaaagaaaccgctcatggaagacagcgccgccccttttcccaacggaaaagaagctgctccccattatacggatacaattgatccggaattgatcaaacccactccaaaacctacgccgcccaatgcggaaccttccgcgcccggttccatgaagatgccggataacgctacggaaaaaatcagggagctggatgccatgcgctccaacggcatgggacaggccctcacaagcaacctgggagttaaaatatccgatgatcaaaacacacttaaagcaggaagcagaggcccctctctgcttgaagacttccactttctggagaaaatggctcattttgaccaggagcggataccggaacgcgtggttcacgcaagaggttccggggcacatggttattttcaggtgtacaaatccctttccaagtacaccaaagcggcttttttgcaggatccgggagaaaaaaccccggtctttgtgcgtttttccaccgtgcagggcttcagaggatctccggatacagtaagggatatccgcggttgggctaccaaattctataccaaggaaggcaactatgatctggtaggcaataacacgcccgtcttcttcattcaggatgccatcaaatttccggatttcgtccatgccgtcaaaccggaaccccacaatgaaatgcctcaagggcagacggcccatgactccttctgggacttcgtctccctgcagccggaaactctgcacaacgtcatgtgggccatgtcggaccgcggcatccccagaagcttccgtacgatggaagggttcggcattcatacgtacaaactggtcaatgaagatggaaaaagcactttcgtccgtttccactggaaaccgctgtacgggaaaaaatccctggtgtgggatgaagcccaggtattgacaggacgcgatcctgacttccaccgcaaggatctctggcaatccattgaagccggagattatccggaatacgagctggggctgcaactcatcccggaagaggacgcagaccaattcgacttcgatattctggacgctaccaagctcattccggaagcactggttcccgtggaaatcgtcgggaaaatggtgctgaaccgcaacccggacaacttttttgcggaaacggaacaggcagccttctgccccgccaatatcgtgccgggcattgatttttccgatgatccgctgctccagggccgtattttctcttacagcgatacccagcggcaccggctgggaggagccaacttcacggaaattcccatcaaccgccccatttgccctttccacaacaatcagagggacggcttccaccgcatgcagatagacgcctcaccggccaactatgatcccaattccatcgggaacaactggccgagagaaacgcctccggagaaaggcggcttcactaccagcccccagacggtaagcagtgtcaaggaacgtttgcgaagcccctccttcgcggaatactattcccacccccggctgttctggatgagtcaaactccggtggaacaggagcacattatcaacgctttcagctttgagctgggtaaggtgacgcgcccctatatccgggaacgcgtggtggaccttctgacacgcattgatccggacctggcaagcggagtggcccgcaacctgggaattcaactcaccagggagcaactcagcagggaacttcccaggcccgtctgcggcctggaacaagatccgtcattgagcctgtatgcccatacggacggcaacctcaaaggccttcgcgtctctttactggcagcggacggcgtcagcctgaaatccgtgaaagaaatctgcgatgccctgcatgaagaaggcatccacccccaaatcattgccccgcacatgggaagcataacaacggaagaaggggaagagctgtttgttgacggaaccctgtccggcactccttccgtcctgtttgactccgtcatcgtcccggaaggggaacaaagcctcacaacgctcctgaaagacggagatgccaagtaccatttgcgccaggcctacaggcacttgaaggccatcggactgcccggcaacgccaaagccatgcttgaggcagcctccctgccccaggatatggatgacgccgggctgctcatgccgaaggacaccaagtccctgatgccccccttcatcacggccatgaaacagcaccgcgtctggagccgagaacctaaaacccttgatttcggagcctagattcgtttcttatacaggaaccgcttccatttacgggctgccccgccgaaaggtgcggcagccgtttttcactaaaaaatccgggggagttaaacaacacttcgggcaaattgaaaaagggagggagatacactcaaaacgggaacggaaaccggaatacagcatgatgataatgccttcttaaaagaaaaccccgcaagcctttaaacttgcagggtttattaatggtacacggagaactatatttctatttaataataaacatattataaaataatagcattataaatagcattatctaccatatcacttccacttcacccccttctccttcagctcagtcacaaactcctcacactctacgtcactcatcgtccccttcaacttctccaccagctccttcctcttatctttctttacccggctcacagccttcacaacctcggatgctccatccatcttcacccggttttccataagtttcctctcatctttccctaatcccgcctcttggtacaccctcaaacggcttgtataatccaatcctctcacgcgctcaaacaacaccctcctttcttcccgcttctcctccttctcctttttttcatccgctcttgtcgccctgatcaacttctgttgctctttagccttagccatctcatcatcccacaaatgcccccatgtcccggccatactcttcgtctctttcacaatgcgccccatcacttgcaccgcagctccaatctccggctttcctgccgccgcaaacaatcccataccattcaaccctcttcccaactgattcatcaccttcccatactcctcatcctctccgttatatatcttagatactccagctattcccctccacaatgtaacaacatgatcactcaccgtattaccataaactcgatatttttcacccgttaatttggaatacacagcctccgataattcagccagaccatacaccccggacaacgcccccatcgctccactaaccacaaaccctttccacctatcccacaaatccaactcctcctcatcgtcatcctgccccatcacccacttaagaaactccacaatcacctgattcatgatcccgtacaccacccacgcctgaccaaaccgccacgcagcctctcccatgccaatctctcccctcttccacttcgcaatcgccatataactcaatgctatctgcttacgcggatcagaccggaacatcataaacatacgccccagcgcggtcgcatgaatctcccaggggctcttctgctctgtctcaataggttgagccgttctccgcaccgccttatccaactcggctaacgccctctgctccacaacctcattactcaatccctctttcatggctttcttcttggccgccatatacgcaatacccccggaaaacgtcgtaaatgccgcatcagtcaatcctatcggcaacaacccggcttccacggcatctcccagcatactcaccttcatccggttcgccgtcaaagcctgcctcatttccggactcatgccctgcatcattctctgttgaatcgtcgggctcttccaaatctccgccaactgtcccggattagccaatgccccaataaaccctttcatggcatctgagggggacatatccgccatgctggaaaacatggccgggagctgcttcagacatgtcttcaggttataactcaaagccccttgcgccatcgcccccaacacccggctcactacttgctgagcttgtccggctccgcccgattcctgcgaaccgtcaaattctaaatccttcacccacttggtcaaatgtgtccttgcctgcgccccatgcaccgcatcaatcttgttccccaactccccattcagcaataccgccttcatatccctcataatctccgcaaaactcgcccaatggtccatctgcatactgtgcgcccaatacgcattcacgcagctcaccacacgcggcagcgcataatgcttccgtcgcatcttgatgctccccacactcatccatccgctccctctggactccatcggatcgacggcttcagcggcattgtccactacgaaaaaccccggcgcataattctgcactttcggcatatcacatccaaacaacctcctgtacacctcattatactctccataccctcgctcatactcctcccctaaatactccgccacccgcaacgcccgcacgtcaatatgatccctcaccttctccatcgcagccggatcaaaacccaacgcctccagattatcctcatactccggcatcgcggacatctgtagcaaatatgccgcctccaaatcgctcatctccatctccaccagctctgcgccctgttccagccatgaaaacttcacaaactccttcctgctcttcgccggaatctcgctcaacgccatcttcagggcatccatcgccttctgattcttcgcccacttcggcaactcatctcctttcagccgcccctccgccaccgcacgcgcctcttcaatccgcacccgctcgctcctaaactctcccggcatcttcacctcaatcccccaagcccgattctcgcttaaatccttcaacataccgtccaccacccgcctcacgcccagcttcacctgaccatccacctttctgtcagccctcttcaaaaactcctccggcctcgcaatccggtacaaggcaccgtaatacctcagcactcgcttctgtcgcacatcattaaactccagccgcgccttcctgatgccctctgcaaaatactccgtcacctttcccgctccaaacaaatcctccatcaaattctcaaaactcacaaaaccccgcaccaaattccgcatccccttacccacacccacatcatgcttcgccgctccggtacgctcattcacgctcaccggctgttcacggcccagccccttcccggcatcctccagcaaatcagcaagacgctcacgccgatcctcccaaaacgcctcattcgccagccgccctgacgcatacatctccttgacagcatccagcgcaccctgaatcctgcctaaatcagccgtcagcctcccgtgcacattcctttcatacaggccgccaaacgcatccagcgcacgcacccactccaccgcctcatcatactcagctcctccaatcaatgccttctcctctactatcttctccgccgtattcctcgccgtctccaactcatccgcatccagctccaatgccctctccaccatatccaaccgtctctgaacctccgcattcatcttcccgcgccgtacccggttctcgcccacgcttgccgccgcccattttctaaaccgttcaaactccttaaatcggctcttctttccttcattcacaatatgccaatccacatacttcaccatacgcatcagcgcattcatccgccccctccacgtcttcttctccatcacctcttcccggtaagtagcaacaacctccggcctgatccctccgcgcacgtccctcggcagctccgtcaccacggcatcacatacggcaatcacgcccagcatccgctctctcacagcctcatcatctttccctttctcatccttatacactccatctctcgtaaacccgttcacttgcagcgcactctccagccgtttctgcattgcatcatacaaccttgcttcctgctcaaatgcctgcccctgaaccccagccagataatcccacacactctgtccaccacgcatcatccgcatggaaaacgacaccataggatcatcaaccaaagactccatcaccccaaccctgccctcagccgttccatcgtgatacaacggcttaatcccatgcctcctcaacagagcagtcacctcccgattcatcttcaactcctccggcattaccgcatacacccactcatccaacccaacagccctttgaggcaccgcctccaaataatcctccaactccgccctcaagctcttcagggcatccacccctttctctaaaacatcctccctcatcaacagcttattcaaacgcgcccctccgggaaaaaccttcttcaacgccgtcatcaccttgccggtcgtcgggttccccgacaccttgctcaacgcctccatcgccgcagactgaatttccacgataccgctgtaatcaaacacatccccgcccttaaacacatcagacacaacctcacggaactcctgcaacagctcatcagtcatcttcttggatgtgccgctcgcggcggaatcagacaaccgctcgcgcatcgccttcacctcatccatgctccccagacgctccgcctgagcagccctcaccttcccggaaccaaacaccaactgttgctccttattgcgacccttgtggctcagcatccacttcgtcaaactctccagcgtcgcctttgtacccgtcccctcaatataccgcgccgcgctgaaccatccttccaacttctcccgcacccacttctcataagccctcttatgggaatcagcatatctcgccagcatcttcctgttggcattcaaatcaggaacgcgtttccccatcctgcggacatccgtcaacacctctctcaacccatacttatcactcaagaaaagactgttcaaaaacgtcttccgcatactctcccgcatcttggctgcaatcgctaagcttcttcttttccaattccgcatacagccctcccacatacgcatcaatagcctcttccgccttctgccgcacctctcccgccctgctttcatactcttcttcactcaggctctcataagcggccagctcatccctcaatgccttcgtcatccacgcatgcttcatcgccgcattcctcatcttcggacgcggacgataaccactctgccacgcaaacaacgccttgccatcctcattgcgcaaacaacgctctacatcctcccgtgaagtcttatcaccggcggaatccaaagctatataatagcgcaggccatgcaaccaactgctatcctccctgctttgatacacatcctccatcttgaacaaatcagctaccgtttgttcccggctctcccgtcccaccgccttatgaactaaatatggcatcttgcctgtccacgcgtcacggctgtacacctccgcgcctccttttgggtcaatcatccccggacggcctatcagataaatactaccatctccaccccatgaatatggttgatccagccttgtcaccgccacgctcggcacaggcatccctcccagtttctccgcttccagcaacttatccggggaaatactgtgtacagctccaagattctgtaccgccctcacggaaaacgtaatatccggatttgccgcatcaaaggttccccggttgtccgtggcggacttaatctgattcggctcaaaggcaatgtactccgtccatttacccagtacagcaatgagtccatcatgtcctctttcttgagcactatcggctatctgggccgctcctgtcgcatacggccggaatattccaaacctgtcatcttcatgaaaattcccatcccaaatatttaaataatcgcctatctcttcagcagacttgtaatcattaaaaataaaaggattcctgatattcagaaacagagccagcttcttgttcccgtacggagtattctccatattggtaaaataaaatcctctgccccataaaccataatcagtagcagatccaatcttggccttgtcaaacaccgtgaaatcaccgtatgtcccatgatacaccaccctcggctccccgttctcgtccactaccttggaagcgttctccgggtcatgctcccaatcgccaaaccaactcttaaacgcctccgtgcgcacggacagccactggtcttccgtcagattcgtatccttcccattcggagccttcatgaaggtgcccgcagccacagcttccttcttgattgcctctttttccagagacggggaaaacgttcccgcttccttcgcagcctccacaatccgccccctttgatcgctagcggaaaaagtaacatctgcttcatattgtccagctaaatccctgtcaacataattgacaaactccttcaacaacgctacccttcccttgtggggtactccatcccctgcctcgcccgtgtttggtacgcggggtcgttgcagggtggcggaagtacccttcatgctatctacatcctccaccgtagaagcatccagatcataaaacaactccccattcttcccctccgccacggcaatattcacataggccaaatcagcactcccatcaccggaagcccccttgaaatccgctttcgtcaaataataatgaaacctggctatattaggcttacgttccaaatctgaattctctccggaataaataaactcagcccgcccggccaactccggcagcacagccaacgcagccaaaacccgtctatcggctgcatgctgtttcacttccctccaccccttgcctcccacctgcaccctcttcccatcccccatcaccagcgcatacccctgttcctgagtcaccttctgcaacactctataccgttcccttatattccccagcgcatccttcaaatcagtcgcatacgcttccggcacatccgcagaaacaggctccatgccctccacttggtggaacgcatcagccacacgccgggcctccgccatcggcacgcgccttaccctgtcccccatgctgaaactcacctcctgcccttccccgcgcgccgcataccgcttatacccgtacaccacactatcatacaccgcgctcaacaactccccggaatcggcaaaatcaaacccggcctcattcgcggcctccagcacatcggacacacgcccatccctgctgaaaaactgctctgcacgtgccaccacccgttgctcaaaacccttccccagcgtaccatccttcctgcgccttcccttggccgtcctcgtcgttgtcagcgcatcataaatacgctgcaactccccggttaaatcagaaccggcctcagccgccgtcttcgggtgcggcagcctcccggccacccactctccaatctccggcacatcccccatcgcctccgcctcaatctgcgcctgttcctccctcctcgcgcgctccgcaatagccgcctcgtcaaacccggcaaaatcattcaacaggaggcggaacttctcgctcatcttcccctgcacatccgctcctagcatcttcttcgccagcatcaaatcctgcgcaaactcaaaatacttggcaaacaacaaagcgaacatcttgaaccacctcctcaacttatccggcagcctctcatcggaaatgtgccccatcaaatgtgcccgcgccgccttgctcaccccttcgcaaaccgcctgtaacctgtccaccccttccccggttgccaaaaacgtctcacccgttgcgccctccagccgcttcagctcatcctcaaactccgccaccgtccactcattatcccggatcagcactttggtcatcccctccgtccactcctcatacacgtcaaacggattagccccccggtacaacctgctcaccacctcataccgcccgttcgcaaactcctgcgccacattggctccgtacacccgcaaccgggcggcatccaccccggcctccactcccatctgcgccgcataaatcctctcccggccctcggcagacttacgcataaaatcgccctgtgtcttcaactgcgccaacgtcatcggcacactcaacttgctccggtcaaaactcatccgcccatcctgccccacatcgctcaaatgctgcatcatctcctcattcgcttcatcctgcaccctcccaacatacccctcatccttatcacggtactgccgtaaaccgctcttcaacccctccaccacctcatcctcccgctcctccaaatgccgctgcacggcctcaaaagcatcctcgtaagaatcataaaactccggcctgtctcccagctccaccacatactgcatctcctccgtaaactcattcctctcctcgcggatcggactcgccccaaactccttcaactgctcattcaccgcctccacatactccctcatcgcctccttctcatctgcttgcctccgccccttgcgctctggtacaggcccatgctcaaaactcaacacaggcccgctccccacctcgctcacgccgccactctccgtccccttcacatccaccacagcacccttcccatcctgtacctccgctccgtccacgcgcacctcatccacccctcgcgccgtctccgcagcatgcgcttcagcagcggccaccacatccatcgtcctcactccgccgcgggcggccagcttccgcatcccatccctgtggcccagtcccaccttcactccgtccacctccttcccgtaattccggcgcatgaaatcctgaatcccatcctgcatcatcgcataccgcgccacatcgctctcctccgcacgcatgcgggcaagcaaggcatcgctgaaaccaaacgtccgcttcagcttcccatactcccggctcaactgccgttgcatcccggcctcagccgtaaaccgcgccccggcccccaccagcgcaaacgccagcacggaaccaaacaactccatattctggtcacggtctgtaaaatctttccagaacctgccccaatcaataccgggagcctccccggccatcacggaagccaaactctgcatcaccggatcggctaaatcctgcaacttctccgtcgtcatctcctcgcccagcaccattcccccagccacgccggaacgcgcccctgcccgcagggcggaactcttcagcttcatcgcctgacggctcaggttcagcctgctcatccacttatccacaaacgcgctcccggacctcagccccatcaccccctttgccacgatcgctcccgcccggtccagcgcgccctgcactgcaccgctcgccgccgcgccgcccatcctcgccagcctgccgccatccggacgctcctgcacggccttgctgtaactatccccggcataagacatcgccgccaccccggcccccacaccggaaaaactcaacgccgtaatcggcacagaccgcgccgcgctcagcaccccattcccaaaccacccatactccggcttgttaatcggcctgtacgtcccctgcgccatcgccagaaaagcatccagcctccggccatactcatccgccgccttcgcgtcagccttcagggcagacccatcgccgccaaacaactccttcactccccccgccacatccaactgagccgcaatcccgcctcgcagcaaagacctgattccattacccaaatcctcccagccacggttcccggccttccatacattcgccatataactcccctcattcccgcccttgcgctgcacaatctcagccagcgcatccatctgggcatccgtaagaccatccatcgccttcagggcttggtggattgaagccatcccctccggctgaaaaatccggttcgccgtaccgtcagcatacttcacggcccactccagcccctccatcacgcgcggcaacaccggctccagtcctcgccttgtcctctccgcatccgccttcacccatcgcagcgtattcccaaccttcttatacatctcctctcccagttgcccccgctgttcccacaacgccttccgcccgtctccgcccgtcagcaccgcctgcctcacgctctcggcagcactcttcagttgctcgtcagcccttgcgtcctccttcgctctccggctgaggaacctgtacaccgtcagccccggcttattaaaatcaatctgctccccctgctccttcaaacggatacacatctgttccagtagcggaaccccgttcctcgccgaaacctgattctcggtatatcctccctcatccaacgcccatcccagcaccagcgaccgcgctcgcaactcatcccccaactcattatccgggaaaaactgcgcctcaaactccttctccacactctccggaaccatcttcaaatccccgttaaacacgctccgatgccaattcacattatcctttctccgcgcatactcagcctcatcctcctgagcactcttaaacgccaatgcatcaggaaacaaaggcatgccgcgccttgtcctctcattaacatactcctgcaccttggctctctcttcgcccagcacacgctccttctccgctttcatcggatcatccccaccctttctcaactcggaggccagcatcttcccgcgttgccagctccgataagcgtcagcctgccagccctccccccttctgccgcaaataccgatccatcgccggatcaatctccacagggaacaactgcctgctctctccgtcatcataaaccgcattcgcgctctcttccaaaaacttatccctcttcccgctacgttcaaactccctcgcctgagccgctacctgtgaaatatcatttccaaacataaaaacttttaactattaaacattaactaggaacatcacttctccccattctcccacgcccacttctcctccaccacccgcttcaatgccgctacatcttgagcagacttcacactaaaaaccttgaatacggcagcatggcactgcctcaaatccttccctttcatactcactccctccagaacctttttccattccttccgatcctgaaccggagccccccaatccccattcagcggaggcaaaagagctgcattaccttgctcattcatatccacccccaactcatccagcacctcactcgcgccaacactcttcagcttcacttcaggctcaggagccgccacacccggagcattccgccggcctgacaacttcacccctataccatccgccgccagcctctcagcctgtgctctaatctcctctcggcttgcccccggattctcccgcacccaccgctccagcccctgtctcacctgataagccgccgccatagacctctcatacccggaaaaatccccttcatccttcgcctctttccacttcccgaacacctccccatccaccatcccctcaaccacactcgccgcttccctggccgccccccggaaccgcgcgggcacactccccacggccagatccttcagctccgccatcatcctctccttcgttgtcttggaaagcatggacgtggcaatctccctctccacctccgcatacatcgtcccgtcaacatccaaatcaggctcatacccccgcaacaaaccatccacccgcataaaatcctccggactcgtgtacaactccgcctcctccttccccatcttctccacagccttcctccgtcgctcttccgccccgcgcaaactcatcgcgtcatccacggccacgcgcccctccttcacatccttcttcaaatcctccgcccggaactcccggccctcaaaagcatccatcacatacccctgagccactccggcctgagccttgcgccttgccgcctccgcctgtttccggaaaccctcaatcacatccggcctacccttcaccgcatccagccctcccgacttctccagcacatccaacccatgaaacggatctctctgaatcgccgtctgcaccttgctctccgtctccttgaaactcacatcctgaaacatcagcttctgttcatccggctccatcaccccctccgcaccagccgtctgcaccgcttccctcgctccataataatccccacccctcaggcaaaaatcatacctcgccttgaaagacttggctgccctctccttactcgccagcaactccctgcgcccggcatcaatacggcccgttgacgtaaacgcatcataccacagccgcgcccgctccttcacctccggcgtcttaaacttaaccttgcggaacataggccccagcctcttactcaccaacgcattccagcgggcctccctccccggtttattccctgccgccagctcggcattatcccatgcccccctctcctcctccatcaacctcttcacatcctcaaaactccccgcatcagccatcctgtccgccttctcctgcaaccgcaccctctcctcatcctcccgcgccagcaacctcgccccggcccccatctccccggccacctccgccgccgcacgcgccggagccgttgcggcccccgtatcggccagcacaggctcatgatacccgctcaacaaagaaaacttatccatatctacttgaaagcgttaaaagccgttgcgccgccctgtaccacgccgctcagcaaactcccgaacccggacaccttgcctgcccgctctgcctgcctccccttccacctctccatctgggcctgctccctcatggcggaagaccgctgcaaactacgcgccgccaaatcattcacctcctgctcaaaccgcgtcgcaaccttcatctccctccccagcgcgctcccgccccgttccacgccgctcgctgccgtctgcgtagcggcctgccccacggccaccccctgcattgcccgcatcctcatctgattctccgcgctctccgcatccagcgcatccgcctccctgtccagcgcggacgcattataataagccgtctgcctcgcctgccgcccggcttgcctttcggcgcgtccccggaacgcgccagccagcccctgaagaccggccatacctaactgaaaccattccataattatcaataaactactttgaaaactgcacatcaaaccccagcaaacgcacatcgccatccccggcacaccgcaactcaaacaccagctcatcactccacacccccggcaccgtcaaatcctgccagccgtccagcacatcgccccggctcctgctcaactccgtcaaccgcccgcaaaaccctgcacgcaccccatccgccgcgctcgcgacaaaccgcgcacgcacgctcacactccctgactttacccccgcaccccgctcaaacgcaagcccatttgtaaccagtacggactcatacggcaccccggtatcgcctccacggctccatccatcacggaacacgccgcacccctccaccaaccgctccagactaacccgcccatcacgttccacagccagccacacctcatcggcatcctgcccatccatcacggccacgctcaacgccctgccgccccctcccagcacatgccgcgtccacgcgcacacccgttgttcaacattatacgtcagcaccgccagaccgccatcagccctcaccccccaaatcctcacctccggcacgcgctgcacggccagccctacaaaccctcccggcccgcctgcatgctcggcaaacgtcgtcgtatcggcagccctgtacccgtccgcctcaaaactgtaccccagctccttcacccgcatgccccctctctggacaaacacgcatcctccatccgtcgcctccgcatccacccggctgcaccccactctcaactgcacggcagcgcggcaaaaatcaggagtcaccacgccgccctcacctccgctcagccgccaaacctgggccgtggaaccaatcaacaaatcattcacactctccatccacacaatccggtggcaatccttggccgccagcgtcacctgaatcgcatcatcatcgctgtccccaatctggaaattggcaaaatcatccaccacgctcccccacaccgtctgtggattcgccgccgtcccggccagccacaacctcccttggtgcatcgccacagcactcggccatccgcaccctcctccaaacatccccctgctccacacatccgtcacagccctctcatacggtagcccggcccctccatacgtcttataactcagcctcaacaccctccacttcatcccccccatctctgccgccgtccaaacctgctcaacgccccgtcccacggctccggacaaaaaaattcaccatatccatccccccgctgcgccacccgcaccacttccactttctcggccaaaacccattcaccgtcacctgaacacccctcgtatcctcctccaaatcccacacagtttcagtccagctaagccaaaccataccccaacaacaacacacacccgtcatccctctccacacacccggcaagccccaaaaaggaacccatcttctcaaccacctgaccatcctcatacaaacacacactccccatggcaacctccccatccgccacatcccccgcactcgctccacccagcaacacagcccggccatcccgcaacggcatcacatgccagacagccttcttgctcccggtcatcgtgcaggcagtcaaactctgcgccacaggatcatacaccgcgcatgcaacgccatccttgctttagcgcacaacaacaccctgccgccatccaccacagcggccttccggtaactcccgcttgtaactgccaaacctgcatgcgccacctgaatcaaactcccatccgcaggatcatacacataaaaagccgtcgctaaaaacggagtcagcagcacccgcccatcatccagcaacaccgcctcgccaaaaaaatcatcacccaccccctccagcagcacctcgttctcctcaccgctatctacatccagcacacaacaccttgcccctccgctgatcaaaaacacccggccatccgtcatcacgcatccccccacccagccgcatccctcatcccgttcttcgccaaccttgcggcccccgccattcacccggtcaaacacataacagcaggcatgggccttccctgccagaaacaacctccccccatccagctccagcacactcccccacacctcctccccataatcgccaaccccggcaaccaccccctccgcctcataatcccacgcattcagcctcaactcatgcctgccccaattagtcgccgcaggcttatacttcatcacccgcaactgcaaccgggtaggacgttcacatgtaccgctgaactcaaaattccgataatccccatcccatgaccaaaacttatgcagcacctcaaacctatgagggttcaaactctcatcctccgcatccgcacccatcaactgaaactcgccctgccacctctgatcctcattcccgtaagtcttcagcgtccacggcccctcatggcacacaaaagccctctgtggcccatcgtcggaagcccgccactcctgcatactgttaaacccgctcccgaaccggctcaccacccatccgggaaagaaaaaatccggataatcagccaaactcttgctccccttataatccgtcctcccgtaatactgcttatagcatgtccatgtaatacgcacatcgccgctcaccgtccacaactcctgccccgccaaaacaatcgtacccgcagcggacaaatccggaacggccttgggcggattactcgtaccggtcaactccgcgtaagtctgcgccaccaccacccgctccgccatatgctgagtataaagcaaactcgtaccaaactcctctgagctgaacacatggcggtcagcaccaaacgtcaacccacccgcaccacgctcaacccatgcctccccatccttggaaatcgcaaactccctcggactccggtcaaactccatcaccgccagcctccaatcatcatcgccatgcctctccagcctctgaggagccaccctcccgcacaccacccacaccacatcattacactgcacccaccgcagctccggcaaatcctgctccgtccacgggctctccagccgggcggccaaactcccatccagccggaacacctccacgaaccccgctccaaacaccaccatataccgccgctcatcactcacatccatccccatcagccgcacccgcccgcaagcggcccctccatccaccacacacatcctctccgtgccgggccgccgcatcagcccgccgaatgtatgcaccagaaaattcacaatcgtctgtgcgctccggccatacccatccacatcataccttatcgcccccatgcggttccactcgcctccggtaaacgccaccctcatcccgctcatacaatccccctcctcccccacggagacaccgctccatctctccctccccgtcccatatcctgcaaccgcgcccggtactgagccctcatctccagctgcctcacatccgcttgcagccgtccctccaaatccccgcgcccggtaacgatcaacgcgcacaggcacgccagcttggccgccagcagctcgccatctgcacagcaccactcatggacggcatcatccggcctcaccagatacaccacgcgcacctccctcccttcccctgtccaaaacaacctcccgtcaaacacgcaccacccggccccatccacatccaccacatccacgcacccctccggcaacgcctcgctccgcacaaaaccgggcagccgcaaatcctcggcaccctccaactgcgtcaccctcttagcccacacaggcttcacctcctgcacaacatactccacggcactcggccacatggcgcgcaaaacagcccccacctcctcatcatccagccccgtcacaggagccttccccagcttggcaagggcaaaattaaccacatccaactgcttcataacatcatcaaaaaactaagctgaaaacggagggcggcccgcagaccgccccccgccgctccacggcaacaaacattgcccggaaacaactccttactgtgcgcacaacaccttaacaaacccattctcctccagccgcgtcgccccgcaggcgaacttggcccggatttgcagggcctcatccatatcatcccgcacggaaatcttcaccttgaaatcattccacaacccgaactgggcgcggctcttcacccatgcaaggcactccctcaccccctcggagttgggcagacgctccgtgcggacaaacttgaaccccataaacgtatcaaccttcccatccaccagagccttcacgctattataatcataagaagtcacctccgtcgtgctcagcaaattaagaatctgcgcggaagaacaagcaaacacaagctgatccccggcggcggcactatcctccgtccacgcatccgcctcctgaaacatctgcaacgtccggcgcagcttagccagcgtcaggccgcttgcggccttcgtgccggactccacataatccttggcaacaacccgggcagcaggaaaagccacagccgtcgtcccgtccttacccacaaaattctgccccagaaacgcggcaatcatcacatcatccatcttccggttcgccgccatcctcaacccctccagagtcttgctcaccggtaaatccaaatcgccaagcttcgtcgcgtcaaactcgtcaaaccctaccgccttggtgaaaatgcgcggacgcatggaacgcctcaacgtaggagcctcatcaagcgcggtgctccccatgcgcgtcgtcttctccttaaaatcaagcaccccgtactggtcgataaacttcacctcccccttgcaatccctgtccaccgtcaccagcttctccaatgcgctcaccttctgctgcaacagcaccccccacttattcgtgtacttgacctgataattatcgctaattgtaactgccataataatataataactaactgttaataacttttacccttactcgctctccatgaccctaaaaccccatcaggcggttatactgctcgtcggcatacctgtgattggcatgggtcggattcataaacgcctcatgtaaagggtggctcggatcatacattatcctctccgcctccgccttcccccccgcagccgcgcctccgggcctgttaagccccttggcaggctcatcctgcatcatcgcccccatctgcgccaacagccggatcatcaccggattcgtgccgatcaccggatcatccaccacggcacgcacctcctcaccactcaccccggtcatcttggccagcatctccagcgcactcaccgcactcctcacatgcgccccatagccatctccccacaacccctccagctcagccttcacagcggccacgcgctcagcctcggcggcatccgccgccctctgagcctctgcgctccgggtggcaaactcatgcacaatccccgcaaacgcctccttcggcacacccagctcccaagccttgcggcccaacacctccaccgcctccgcatcccacaccccctccggcaacccctccggggcagcgggcaaaaactcctcgcccgcaaactccttattcatcccaagagcctccctccatgccgtcattgccgcctcatctcccaaatcatacctcatcccggcacccgctccgggcgcggctgcgccgccatctccttctcctccagctccatcaccacttccagccccatctccaccagcactatttccggcaccagccatcaggctcaccgggcctccgccatttgcgcccccatcaccagcctcctcgcgcaaaaaaccattcgcaatcaaatgactaataaacataatatcttaacttccaatcttaatacttaacaaatccaccaacgccacctcacgcatcccccctgtcccactctctccctccacgctcaaacctcacccgttccaccccctgcgcctgctcacccaaacacctccgtgccagctccaccagctcatgaacactcccccacgccaaatgcacataaaacacgctccccccatcctcaagccatcccagcaacaccacctctccgctcatcgccgccacacctcctgcatccagcacccgtctgcactcctcccacaaactctcatggccgcccgcatacctcaccgcccactcatacccgctcatccttggtgaaaaacttgaaaaacgccacggcggcggggatccgtgatcacaaaagccgggtaatcacgggaagtgaacaccctgcgcccgccctggggattgacggcctccacggtcaaatccacggcaaaaacatattcgctatgatcatttgcagcatcataattcatagtcacacacagccgcgcccatacctgacaggcctgccacggctccgccagccccaccagcgcagcaacgacggcctgcatggccggagcctgctccgccggaatctcgtcctgcgtatagcgggccggaggtctataacctcccgaatcctgataaatgggcgtcaaaatgaattcatcccattgaccaggctgcgggaactgtatttgtatctcggaattattcatactcaatcttcggtaattgtttcggcttccgggtcaacaaaatcctccaccgcctcggaaacaatgatattgctctccatggaggaaaaaccgtaatacgccggattgacgttattgcaatgcaagtgcatcgtcgcaggcaggaaagctccggccaacgcccagctgttggtattctccatatcaagatagtacccggaaaagggataaatactctcaaagcaatggactcccttcaccgtggcgattttgacgcagctgtgggaggaattcccgccatgcagcagccacagcgcacccctgtcttcggtatcatatcctccgtcctgatattgctcgtaaaccaccgcgtacacgcagacgggataaccggtattggaagacgtctccggcgcgagggcctgcgtcgtcttcatcttccatttctgctcggcattggaataatagatctcccggacgcgaatatgataccctcccgcgtccgcgtcccggacatgatcaaacgtaatatcgataatctccccaatcctgtagcctccagccgcctgatccggcaccagcgtaaacgcgtccctgtcccgccccatgcgcgcaaccgttgtcatctggccgaacctggccgtgaatttcgtgctgacagcaagcagccgcagcggggccacccacccccggatgctggaataattgtgcatgggcctcgcgttggtcacgaggccgcatttcacggtaaaggcggaattgggagggacattgaaataaagggaattgggttccctgtccgttttgaaaaccgtcccattggaagacgagcaatccgccaggagcggataacacctgacggaaaaagcgtcagttacggcagccagcccggcggcgtacaggcggttgaccgctgacgtatccgttgccgcccccacggccagcgggatgttgatgcctccgttggcgttgacggcccctgcaaaagtcccggactcagccgtcaaactcttcaacgtggcatcatcccccggctgaatgccgtcccgggcagacaatcccgggacggctcccttaaaagtctgagtaaccagcgcatgctcatcagacacctccacagcatccgtgggagccacaaaaccgtattgcccctctttgcccgcttccaaaacaagcaggggagaagccccatcaaaaacggcatgaacggtacaggccgtcgtacacgtcagcacatatgaacaacctttaacggtatcaacaatcatacagccccctccttgaaatactcatcaatcgccccggcaatcgccacgcaaagcgcgtcaacccgctcctccagcctgtcgcaatccgtcacgtgcgaagacgcaaacgcaggttccagcatcaacagccggcatccgcgtctccttaaaataataataccccctgtcactcttacacttgatcggcttcaagccacggttcggaagcctcagcacatcacacatcgccgcctgaatcaactccgccgctctcttgccattcttggaggcgtaccaatacaacgtctccgtgcctccaattcccgtatctgcaccgttaaaatgacactccacggccaaatccgcgccaacggcattacacctccgggccgcgtaaatcggtgtcgtgcccccagcctcagaccggttgcacaccacagcctcataacccagccgctccaactcatccttcaccttgccaatatgcaacttccagaacccatactctgaatgcttccggttcgtcatcacagaccctccatcctgcgggctatgcccgatactcaatgctactctcatcatctatttattcttgcttataaactgttcattcgcctctactacaaactgacacgaactgcacttatgctcggccacccgacgcgcctcccgctccttctccaactccgcctgcaacttctcattcttcttcgtctccctccaaaggaaaatcgacatcacgctcaccacactcgccggagtcatcaaactatcaatcgtcggggtggaagtaacggcattcgccaccgtcagcattgccgcgccaagaacggaacagctcgtcagggaaccggtcatcttacttatcctgtttaactacgggaggaacatcactcacgggctgaacctgtgaaaaactcacacgccccggctccagaaccaaacaagtcccatccttgcacacctcagcccggtctggcgtcacatccacgttatgaccgcatccggacagggtggcaacaccgccaaacaggatgcctccaataatgactcccccggcccagtaaagccattttttccagccggtggaggtcttggcctgccctaaaaggtagttgcggacatcccccagcgcatgcctgccgataatgggaagggcttgctgcgccaatcgcacaaacgctgcccgctgtggctcggttaattcttcccaggacttccagccgccgccgttatcctcggaaactaccgcgtaaaaatccttggctatcgcctcggcatgattgcattccttatcattaatcatatcacatcttctatcttcaatctgttgatctccgccttctgccacctctgtcacggcaggccgtttctgccccttccccgtactcttgccaatccctctcctgtaccgtctcttcattactcgcactcctctctacccttatcctccggcagcatctccagccacaacaccacctcccggtgagcatcccgcctcatcgcatccaaaggatcaaacaacctctccccatcctgcttctgaaaacacggcaaatctgtctgaaaaaactccttcatccactccaacaccaccttccactcctcgctccgcaacaacaacctcttggccttccacctccgcgcaaacaaatctaacaactccttctctttatttacatcgtaactaatcataaaacgtactattcataaatcaactacaccgcgccaccctgagcctccgccgccatcttggcagccgcagcctcatccttcatcacagacgcgcccgcctcccgcagcctcaactcctcctcatcctgcaccgccgcattcttctgccgcctcatctcctccacctcaatattctccctgatactatcctcagacacgccaagagaccgcagccgcgctctcatgccacgatccacatccaaatgatccagcaaaccgggaaccgcctcaccaaactccaccgcctccctcaacgcggcagcaaaagcatcgctctcaatccgcttcagcaccaacgccaccttattattatacgtcacccccggattcttcagcgcagtccccacaacagaatcattcctaatcacatcctttttcacgcaatcaggcggatctggaaaaaccccggccctgtacagcaccataaacaccctgtccagcgtcggctgcacatcataggcaaactgcacaaaagacgggaaaaactgcaacaaatactgattctcgcgcgccatcacctccgtcgccgtgggaaaccccttcttaccctcatcatacgcgaacagctccagcatcggcaccaaaaacgcatccttaatccgttgctccttatccgcaagctgcttgtaagacaggctcacatcccccacagccgcccactccttcggcaacaacactccgccatcctgcaacaaattcggatcaaccaaagtcttcccgccagcccgcaaatcaacctcgcccacctgcttggccgccgtcaaaatccggggatctatcgccacacgccgggccttctccaaatccttctcaatctcctccacccccctcacctcgccctccacatcctgccacggagcaaacccgaaaaaacttgacccattcatcttccagcgcgtcgccatatacggcatctcccactccatctcccgccgcatcaccctcttcccctgttgatccacataaaaactctcccagccgcggcccatcttcggcttcttcgcccgccgcaccacatgcagcaccacccacttcttctcatacatcccggccccgccctgacgataatccaccgccatcccctcactcaaagccgcccggccaaacaaatccacaacatcataagcagacaacagcatctccctcacaaacaccaccacccggccctcgtcatccacctccccgcaaacctgctccggggaaatcgccttaaacaacaacctcccgctcctgcccggcccgcaatacaagctccccgtccccatgccgacacgatccagaaaacactcgtaaatctcggaataaaaattgctcctcgtcagttccatcaaagcaatatcggaacacttgccataccatgcgttagcctcatcctcatcctcctccgctacatctccgggcctcgcaacccacttgaaccacggctcatggctcgtcacaatatggctcatgtgcgctccggccagccgggcacaggccattctggccgccccattccgcaccctccccacaaaatcggacggacgaaaccttaaatcatccaccctgttcggcagcaaataccagcgggcaaactgccacgtcttcgcaagctcatcccgttgcgtcctcagcccgttatacaggcgcaccaactcatccgcctcatcctgacggctcatcccaacgtctcccgtttgccattggccgcgcctccattctgcctctctacctcactcgcaagcagggttgatgccctgcctcgccttctgcgctgttcctccagtaagctgcgcttcgccgcatgttcgctctccccggcactcaccgtctccacctttggagcctgaacgggaggagcttcactcttcatattcttcttgaaacccatacctcactcatatcatgaaaaaacaaaaacgcatctaatcatttaattagataccaacacaacacgcaaaccatcaacaacaaacacataaaaaaatcaatccatcctcgccaatcctccccgccttctcccacctccccaatcatcatcctcatccagccatccgccagactcatcacggctcacaaaaccgctcgcccgtgacaccagccccttcttcaacgcctcgcccagcgtcctcaacgcatcagccccatgagacgcctcattatgctccggcacatcatggctcaccccatcctccagcaccgtcttcttgcggtaagcagcaatgcaatccaccccgctcaacagcttcacatcaccctcaccccggcactccttcagacaatcctcatgaaacaccgcattcttcaacatcgtcctcacggcatcaatccccatccacacgcgcggaatcctcggcaccctcaccagccgcccaccaatcccggtattctggaaaagagacataggatcaccgccccaattcctccggttcccgtcatgcggaaacaaatgctcatcaaaactcatccccaactcacgctcccacaaacgaatcacctcggcatactccgtcatccccaacccgctggactggtaaaacttcaacagcctcacctcataccctaccacctgcgccgcccaaatagccgtactatcgttcaaccctaaatcccatgcagaaactaacgggaaccccggctccacggcaaacgccgcccccacgcgcccctgcgccctcaacctgtgcatcgcggcaccataaatcgcccccgacacatgcggccacaacgcctcctccggcgtactcggatactcctgcttcatcaactctccctgcgtctgcttcatgtggctgtaccacaccatctgctcctgactcagactgatacccttctccctcaactcgtcaaaatacgccctgtcctcatccagcacatcatacccttctccggccagaacgtaccctgaatcctcaaaccacgggaaaaagaaaaacttccattgtacattagacagcctcttccccgtcaaatccagagcccccttcataatctcataattcaatccagtccggccaccttcatgcgtagactcattgaataaaaacccgtcactcggcaccgtattaaacgccccggacaatatttccgccgccttggctggaaaatggcacgccgtactcccaaactccgtcagccaaagcaaatccaatgtgccgccgcgcaaactggccccggaataaatatcgctcccattggcaaacctcagctcacggtcattagcatacaccggcaccagccctttgctcttcacctgcttgcctgtcctctccttaatcatccggcccagcctcgccagccacaaatcctcatcagtcgcatgtgcaggcacataatccagcctgtcccatgcaaacctgatcttgcccagcttattctcggcatccggcaaagacttatccacaatcccggcatggaacccatcaacaaacaacatgcaatccaacgccagcatcgcaagataagtgctgatccccatctggcggctcttcaaaatagcattgcggtgatgcagcccccggtgcaacttgcgctgcaccctgttcaggcggaaccgcaccaccttatccccacctatcaccatcttgctctccacccaatacaaatgattcaaccgccactccctgtctccaagcacctccgcaaacctgcccaacacggtatcatccatgccattaagggggggaaaaatatctctactcgccatctgtcaccgtctcactattgccgcccaccttcaaactctgatcacccagcaggccgaaaatagcctccgccaacgtagggcctccaacattcacctcagccggggcattatgcccagccatctcattatcaatcttaatcgcagtcatcacctcctgcacagtaggaacggaatcaaacagccccaaatccacgcccacctccccgcgcaccagcttcgccaaaaacctcctcttctcctttgcgctcagggcatacccatcatcaagctccgccctcaacctcttcagctcctcctgtatgtgcggctccctcatcttgcggctcgctcctgcgctcgcgctcgcatcatcaccgggattccacacaaccgcataagccgcgcggggagaaaaactctcccacacaaccatcttgcaaaactcatcttccttatcgcttaacttcttcatcttgcatccttaaccttaatcttgcaaacctgccctctatcactctcctcccctctgcactcgcctcatacatcacacagggcttctgccccttaacctccagcagccccttcctccgcaacctcgccagcgcattggaaacagactggctattccgcgcacggcaccactccaccacccctctgcactcagcctcacccagctctcccaccgccagcagcacaagaaaatccagcggcatcatctccagctccccaaaacacaccgctctcaccgtcgccgccaccaaacgatacatcttcatcgtcgttgtggcaacggcctgaacgggcggccctccgcatggccgcatcctcctccgttcaaaccatcacttacgcattaacgcttcaaccgcacgccacttcaggcagcctcaacctccacaccgaacaccccggcaacaatcgtcttgtaccggtcaatgcccgtctccgtaggcttcacctgaatatatccgttatcagacttcacatactccagcaagcccaaatcaatcagggcatgcgcatcacggacaaacagcgtattccatggctgtccgaacaaacaccacttctcgcacacttccaccagcaatttcagccgttccccgtggtacttcttgccctgccgtgcctgtctccgccctacgcgcgccatacccgccgtaccaacacccttgctccgctcagcatcttcataacaacacgcctcctcaggctcgcagcacggctcacaaaccatgctatcgccatacatccgcacaacatcctcctgtgttgccttcatgtcctcactcttccccaccttgctcttatttactgtctttttaaccataatgtatttatattattatgttttttgtctttgttttttccgggacacccgtcccgggaaacctgtcacgcacgccggaaactccgccaaccgcaccacctgaccccgccacggttctcgctcctccgctggatcacacgatccttcacgctatccggcataaactgattaaaatcctcctgcgtccaattcgccacaatcacagtatctaactccgcgttgtatctggagttaattatctcctcgaaataatctaggctcaggtccctactctcccccttgtacccaattccgcgctgaaactcatccagaaccagcaaactcttgcgccgatgccctatctgcacggcaaaatcacgctcaaaactgcctcccaacccaatcttcgccagcctctccctgtacaggccatccccgctgaaataccatgccctctcatacccgcaatcccgcgccagcttgcaggcagacaacgtcttgcccgtacctctcaggcccaacaccacggccagcatccccttcccggccatacccatcagccaagccctcaacatcccggccttgcgttctgcatccacatcatccacgcaggcaaacggcagcttcagcttgcaatactgttccggccatccccacatcatcagccgcttcagcttgcgggaaaacaccacatcggcatcatcaaacatcgtcggctccgcctctgccacatcgctctccacatgcagcgcaatccgggacagcacatcatctaaatcatcattcatcattaaaacccttctgcatcaatcacaatatcctctctcactccctgacctgcggcccggccacggcccttctgttcctcccgcaaccgctccttctgccacttccgcgcattctcttgcagccaaaccttcgccttatacctccaattcttcagcaacccgcctcccgcagtcctcccgtccttgtaatgctcgtaaaaatccgtcgccagcatcctcacacgttcatcctcccgttctgagtaatgcaaaccattccgcatctcagccagcacctcctccacgctccccggcacatcgaaagcatacacgcccgcacaccgcttcggcctttttggcacgacaccggccacctcctctttaaacggcaactcactagctctgaaaacattaacactacttaacaaatcggttatcacaccgccgcgagaatctgaaacacctcctgattcgtcagaatcaggcacttgcggaggcgtagcctccacatgaaccaccccggaatcctgcgctccaccgtccaaacggccctcccccgcgcgcgcgcgccccgcgcggataggtgcgggggtatgggggaagaataggggggtgtggggggggaaagagggggaaaggggggatgtctgacaactgtctgacatatgtccgacaactgactgacacttgtctgacaactgactgacagttgacggacaatcgtctgacacggcctcctcagtcgttgcaaccctcacaggaggagccggaaacttaggctcgctcctctgtctcacgccccactccgtaatcgccagataccgtccgccttccgcatcataccgcacgatcattccggcagcctccagctcgcacagggccttctccacctcttccacgaccagattcacccgacaggaaaaacacttgctcagcacccactccgcgtccccgtagaacctccctgcactatctgccgccatccgcagccgaacgtacacgcgctcccctgtggagcttaattcatccatctccacctcctgacaccagtctctgatttccctgcgcggcatcgttaaaaaagtcagttggaattgtaattcataaccacttgaccgtacacttttcgtggcggtctttaatccaatggaaccatgcgtatgcaatggctccgccttcggttttggcaaaatccccatttttcgcacaaaccctccgatctgaaaacacccacacatctgcgggtggcgctacgtcgaataaccggcgcctggccttaccctctaaaaattggagacgcaacagcatccagatgttggcacccggactggcacagataagcgctctctcaacaaattcaagggccgttgcatagggaggattggtcataatgtccacgtcccccataggtgcgccgtcaaactcccacaaaaaatcttgcaaacaggaatcagggcatccccggtcaacaatatcggttgcgtacacttcatgcccgcgttccctcaaaacgttgacaatgtggccggccccgcaggctggttcccatacatatttccggaggggcgcaccggcgttgagcagatccctcaccatgtccggatgcgtggcgtagtagtcttcccgttgccgattctcggtagtgtgactggatgcgcccagcgtggcgccaagggttcggttgttacctgtccagtccttcatgccccctcctttccacgctgtaatcttccgagcagaccccagaatgcagttgccgccactcccggaacttgtccgttgccaatggctttaatgcggtccactctagcggccaccccatgagccactcgacccacgtcgggttcagctgaccaccactccccgcagtcatttgtctccgctcgtccggcgtgataatccccttggcttccaagtctttcattttcaggaaactccccgtcccccccccgcacatgcccttggtgcggggtgttggaaactgtgaaaccacagttatcaatttcttccctgttttccggttgctttccttgtcgccgcaactggcggttggagtaggaaacatccggacaaattcggacaatccctgttgcctgctgttcgggccacgtctcttgtgatccgaggcaagggggctcggaaacatctctacaaactcgtgtggattgggcagcttgttcccctcccgaaacttctcgctccgcttcttcccggaagcggttggagttccaatccatacaccttttttcagcaaggcttttcgggaattcgaccctccgtcgagacctttcgttgttggggtcggccacatcatccccggcatccagcctgtggaggctacatccagcaatgacttggggccccgtgaatggctccccttgtttggggcgttgcaagccgtcggcgtggggatcatgtgcaagtatccagatgcgtttccggacgtgcggggctcccacgtcgtccgctcccagcacaagccattccgcatcgtacccgatttcggcaagatcaccgaggactctggcaagtcctctgcccacaagcaaaggtgagttttccaggaatgcgaatttcggtcgtacctcattgataattcggtgcatttcccgccagagccccgagcgggcgccgtcaatgccttggcgccttttcccgcggctgaaatgtcctggcaaggaaagcctcccgataccacgtcaacaaggccgcgccacggtcgtccgtcaaaggtgcatacgtcatcccaaaccgggaaaggcgggagtatgccgtcattctggcgggcgagcagtacgcttgcggggtagggttcgagttcgacggcgcagacggtgcggatgccgagcaattcgcttccgagtatgcctccaccagcgcccgcgaaaagatgtagctcattcactcgccctcctttctaaaattgccgcttgctcgtcagtgatatactgccagctctgcggtgggcgagtcagtccaatggacgagagcagcacgagggacgggagtttcacggggtcctggatgccccaggcgtagcaggggagataggcgcggatatgttcttccgtcacgcaggcttctctgatcagtaaatccaaggcatccccgaatggcatatggcgcaaagccacataagagaccatcctacacttgccgataactgcccactccccgtccttgccggattcataaagccacagcgtgacgtgttctccgtgggggatgcatggcttatttttacgtagctcccatgtcttttgcccgtccatgataaaaccggagaaaggccgcctgacggataagaggatgttaatcattactggcctcctttttcggttcccaactaataggccaacctacaccgtagcagagcgcgcaaagcttgtaatgggtcccatcatgtttgcaagtaaagcacccccgctgttgaggtggtatccatgccctgcacgcggcccgcttctgccatgcgtcacggatggcatcttcaactccgtacattattcggggttctccgtggtaatcgctgcattccccgtagccttccgtgaagcgcatgaggcttttccgctctttcaggatgccgcgggcttctccataggctaggatcgctttctgttcaggcgtcagtttcatttttttcatagggtaaattctttcccgtacaacgctttatacatattgtcccttttcttccgggcggtacgaatatcacatgttttcaaattgatgtttagcgatatgatatgtttacggtctgtgatcaagatgttgaacacgtaaccgttttcattgagccgcaggcaataatcttcatcacccggatcatgaatttctccaataagcgtatatagttttttcattttattattcgtcccctcctttctgatcgagttcccaatatttataagtctcattcttaaaatctacgcattcgaaacaaggagacttatagaaaggactggtacagtatttacaattatcacaatttttgctgatcttctcaatctcccacggccacagctccacatcgtcatgatgtacgggttcaggcggcccggaagccgtttccagataaagaattccccggtctgcgttctttccaatgatctttttaggatgccggtcttcgtagagtttcaccttatcccccggccagacccgcatgataggcgggaacttggagatgaattcttcggcggccttccatgcttcttccggatacgctttgaacgtagtccattcacattcgggacagcctacggttcctgccatttcgtatgaaaggtcttcgaattgttttagaggcgttccgcacagtgggcatttaagcgttttcatttaatatctccgttaattgttaaaaccttaaacttaatcacccatacccacggattcattttagctgatccggttcctttaattttatcccacagagaaaagtaagacatccgggcaaaagccaatccattggatttccctgaataatccttccataagtgggcatcagtcatttcgtcgtgccagacgctttcaatgccctccatttgggcatcctgcggagtaatgtctaacagccgctcaattcttacttccgtcacttccagtaaaatccgggcggcccgacgcggcatgtgaatactgggtttccatggtgacgcatccgagctatctttgttaattttgatgcctccgtcgtcgtccaagacatttacataaccttggtgagtggcggcgtagcaatattttccggtgggctggaattgatcattgtacacctcgaaaaaagtttctttcacccacagtcgatcacccgctttcccataggggcatcttacccacgtattaaaaacatcatccgggaattccccgtcttcgtcgttggagatagctagccaccagccgggactttcttctatgaattcctgaatcttccagcctttttctttcagatatggagggaaatcattaaaccggtgcaggccgtgcgtgcggcgcgtctggatcttgtactggccgggcatgctgtattcctgcaataacgcgcggatcatgtccccgctgaacaggatgggccgttctttcacattgttattcatggttttggttcttggttgtttcggaatcttccaaaattcggtaaatcctccgcaagctgtacaacggacggcccaccttctggtgcggttgcttcatggatcgcttaatctctggatgttgctgagccgtccggtgaagccatgaatcactacgccccagcaccgcacgggccaccttcgcactcacccaatcctgcccactctccaccttcacctgtattcccgcagcctgatcctgacctccacccgttgcagccaaccgttccactacttttgcggccagcaaatccagcacggcatccgcaaacaaaatcttgttaaaatcatcagccgcagacataaacacctccaatcaacacaaaacacgccactaccccaatcccccacaaccaccctctcacccggcagcacctccccggtgtaccatacgcccgcatgcaaggcctgccaccccaaggcaaatcacccatcctcaccgggagcacccttcctgcggagggaaccaaaggacaccatgccctctcatccctccgcaggttgggcttgatgctctcctcatcatgcgccagaaaatggcctcccggacagggattacccccatgccagccatcatcttcaattacacccatatcattcagttgttggttgttgttcttggcctccaccttggagccgggagataaaatcttttcaataaagaggactgtgactgtaatcccaccccagcaacatcaactcctctagcatcgcctgttccaactcctccaatccttcaacctcctccatcaaatccatcatgccacagtccctgctttcagcttcttcctgcttgcggatgcttctttcacatcggctccttgtgtggcagcttccgccaccatcaactcaaacgcctttttaggagtaatttttaattgctcactcagctccatcacccgcgccattgctcgcggactcaggcccaaccaatctatttccggtcgctctgtctttcgcatgcgtttcttatgtagtttttttatcaacatgtcaactaaaatgttgatggaaaaactactattcaagagtttttccttgttatgtgttgattcctaatctacaaaccactcatgcaaaacatgacggatgagcaaataagaaaaaccgtaaaagactggctaaaagaaaacggacgaacccaagcagaactagcttctaaaattggactcaaacctcaatccttcagggcacaaatgagtaagagcaagatttcttctcaaacaaaactcgccctaatgaatattattccttcatcatctccttccatgcttccaaacttagacaatcgcggaaaaatggaattgcgattggactacgacactcaaagacgggtggaaaaagaagctctacgcctccgcatggaactctccgcttactgtacaatggcagttgaatggtgtagtgaacaagaagatataggagaacgccttgctgcccgactggcctctcaacaacaaggcacggaaaaacaggagacagccaaacaaggcctcccctcccatacggaatcttccgaccccgccacccggaaacgcacaaccgaagaaactctcggcatactgcgcatcggaactaatccgggcgcaaagagaaaatcaggctctgcgtaacatcatcggttattacttctctaattgtgattttgacttggatatttgggaaaaactgtccccgctgaactaagccactccttgccacaaccgcaccttctttttcaagaaatatttgttagaatttgctttttctaacaaataaaaaacaatgatgagactttaggcgaaacaaaatacgcgcccaaactccttccatcaaaaaataactgaccaatccacagtaatgaaactcaaaaaaattgtcactagcacaacaaccattaccacaccaagacgctctttcattgttaaagggcaatcatctccattgctatctacaaccttattatcaagcaacaattttgaacaaatatacatcattgaatcataatgttcatttctatcccaccccttcagaagagataacagacttccaattaaaaacaacacgaaagggccaataaaagaaccatcgtatataaatcctatgacactcaaaattacagcgaaaaagaaaattgtcccttgaataaaacaattagaatttacccaacaagaatataattttttctttaaatcccctaataattcaacctctttttctcttatagaattcaatttattcaattcattgttaatatcatatatatttttcttaagttttacattttcatcacagacctcataataatctttagccaattttctcaaaacatctatttcatcctctatcccttcggtagacaatacccgtatatctataaacctttttgcgtgttctctactttcagaagccaaaagcgcactaacaggattctccctcttacttaccaatcgcattgcacacatatcgtcacaataattataatttaaatcaaataaagaaaaaactttacaactccggcaacttctccaacgccttctccgtcgcctccgcgccaaacttaatatacccggcatgcacagcagcggatgaatgtcccacaatctcctgcaccatcgtaagcactaccccggcatcatgcaacatcgtcgccactgtataacgcaaagagtggaaagacagctcattcttcacccttctctttccgtctctggccggagttaatttcctgtaccttttcccggccaaccgtggatcacggtcaatcaaaccggcatcaaacaacatcccggaaaactccgcagacaacctgccgctccctgaccgctcatacatctcggcacgggacggatgaacaaacacggcatcctctccacagacagtttgccgctcgcgcaacactccggccaaagccggaaccatcggcaccaccatctcccggcccgtcttctgagtcaccaatttcaccactcccttatcccaatccacagcatcccacctcagcatcgccacatcccccagcctctgaccgccaagataaagagaacacaacaccatactcctccactcatcatcgcatcgctccaacactctccgcaactcttccagcgtaaaaccgcgccgggcagttcttccggtttccgtctttttatccctcggcaactccactcccattccgggattcctctcaattacccccaacttaacagcagcattaaaaacagcgcaaaccatcccaaactccttcttcaccgtcttgacggcaaacattccggccaattccaacataaaatcattcatcatgcggggagtaatacgctccattgaccaatcaaccctatcttccaaaaatgcataaaacctgtttgtggcattccgataattccggacagtcgcaacagacttcccccttctgcccaacccggcaataaaatcgccaaaccaagcacgcacagtaggagcagaaacctcctcacctgtcacctctacagccagctccccaatcacctttcgtatatggaaaacagtccatcccttctttgcggcggactcccacgcatcagccaccttttgagccagcttccgcgcatccgtcgcggacattcccgcctcctttagagcctccaccttctctggctccataccgctgcttaaaagcctctgagcatccttctcagatatagcaccagccggagcaacttcaatcttggtactatgagtgacaagtttccactttccggcagcggtaggtacataaaaacaagcatgccagaaccgagatccctttctgcatctcaaaaacgccatgcctgatatagcatcacaactagcatcaaaaagcaactattcatatcccgtcataccctatcacctgacaaactattcattaattaactctctaaaaaacaatgaaaaagcccgcactttcattgtgcgggcttttattcaaaaagaaaggttttggtacacggagagggattcgaacccccgaccaactgtgtgtaagacagccgctctaccactgagctatccgtgcgtgaggtggaaggaatatataccgggaaagcaggcccggcaaggagaaaatgaaaaaaatgcgtcctcatttccctgttctccatgactgtaaaatccggacaccgcaaattccagaaaatggaaagaaggcagacaaggatttcctgtccctttccgggaatatgtttccgtattatttccggaacctgttcccctacctgacatctacgcgtcggagcgcgcggtaatgcaggataatgaagagaacgcacaatacggcttcgaaccaatagaacatgtctaacgcatcccgaccggaagtgaaaccgtaggaatgcagccctactccaagcatgttgacgccccaccaggcaaaggcaatgataacgccgcccactacattgctgaagtggagcagccaggaagacagccatccggctttccggacatgcaatacggtcaattgccacagtacaatcatcaatgctccgttttccttgggatcccagccccagaaccgcccccaggattcattgccccaaatccccccaaaaaccgtccccaccagcgtaaacaccagggaaaaacacaagatgccgtaagccatgcggtccagggattgttccgtttttccactgatcaggcgcaggggggaagccagcaggtatatatgggagagcaccgccgccagcagcccggccgcgtaccccagcacaatggtaatgacatgggtggaaagcaggaagttggagcgcaggacggccaccaggggatccatatggtccacagcctgggaggcttcatacagaatacccatctgacaggagaaagccccaagcaaaagccccgccgccagtacgattccctttttactgaaaagttccaccacaagagcgcagagcactcccatgcaggcgatgaaggcgatggtttcatacgtgttgcccaccggggacctcatggtgatgagcatgcggatgaccagcgccgcggccagtactccggttccgcccgcgcctgtcagccacgccaggctgaaacctccgggccgaagaaaacgccgccagaggggagcgttggcggcagggcggaaaagcgcacagagcagcaggcacacgaacgccgccacaaaaacggccagggaaatataaagcggatccagacggtagtagaaaatttctctttccaggctgtgccgctctccggcggaggcggcttcattgggttgcgccagcttttccagcagcaggccttccgctttcatccgcagtgcggaagcctccgccccttccataccgatagctttgcgttccagcagggacgccattgccaaaaaggctccggcaactttatccggggcagccgtccacaggcgttctccatcgcggtaagcagaaggaaaccagcgtgggaattccatccgttccatggcggaagggttttccagcatgatccgggagacaagcatccatccccgcattacgtcaaagttgcgggcaagggacaaaatttccttctgggcttccgtcagattcgtttctcccagcaaacggatttcccggacggcacgggtcatttcctcccagcgttccgcaagctgcgcgtaggagtattttttacgcttgtctttctgatccggcagatgcaggcgcctgaccacctcttcccgattgaccaggaaaacagggtattgttccgccagttccggacggaacatgcagtccagcatccattccaccggggaaagcttccttttcccttccggcgtatcaacaacaaagcttcttttgcccagcgtccggagcagatggaaccccgcataagtagaaaccggcttcaggcggccgccgtcctggacggccatggccccggcccgttccaccaaagcgggagaccagggcacataatttttcaccagaacaggatgggcggcaggacgcgctgccagcatgccgacgccgaagattgccgctaccagcaggcaaatgcctgccagacgcaaatgttttttcccgccggggacggaagcggcctgcggttcaaccgtcgccgccgttccggcagatgccagaccgggtttgcggcgcaggtatctgccaaaaacacaggcaaaatgccacagcaatcctatagcgatgatgtaggaggaccatttgggcatttgctccaggggattatgggaagcgcggagaatggagatgagcctgcccggatgcagggaatcctggccccagctcatctggtacagcgtccagccggaaaggcgcaggggctcgttcatgcggataacggcgtcatattgaccgccggactccggaaaaacggttatctgggattcataggatttaggcttggaagtccccggataaaactccggcacaaagcggttcaggcgcaaatcaaacggaagggaatattcatgcacccggtccccctggggcagttccacctgttccacggccaccgtcattttgttgcccagcatgatgccggccagcagcagcaaaattcccccatgagccaccagcacgcccgcgtgcctccaggtccaccggatgcggaataccccgcctatgagcaggttggcgaacagcaggacacaggtaatgcccatgccgggcaaaggcagggaaatcagggagttctccccgcccagcggtatcagcacataagccgccccgaaaaaagactctatggcagcctccgaccccatggcagaagacagccgcacctggtgcagcgtcccggcaaaggtcagcaccagaaggatcagcatcagggcaatgcccaagccgtagcttccggcaaaattccagaggctgcggccatattttttccataccgcatccgttcgttccctgtccatcagcgtaaggcgtccgtagtctaaaaagagggccgattgcacgatcagctcgtgaaaccggccccaatcatattcctggggaaaaggttattaaaagttgtccgccagttcttcaaagaatgcctggggatgcgcacaagccggacataccttgggggcagtggaaccggtatgtacatagccgcagttgcggcacttccactggatttccttctccttggcaaaaaccctgccttcgcgcacattttcagccagcttgaggtagcgggcttcatggtgctgctccacggaggcaatcttgcggaaagtttccgcaatggcggggaagccttccctgtccgctacttcggcaaacgcaggatacatgtcggaccattcgtcatgctcgtaagcggctgcggccagcagacaatcctccgtagattccaggggagccgtgcagacggcgtgcgttacttcaacgcaagcgtctttcagcagtttgaaaaataccttggcatgttccttctcattgtcggccgtttccagaaagatagcggcaatctgttcgtaaccggccttcttggctacgcaaacaaagtaggtgtagcggttgcgcgcttctgactccccggcaaaagccttgagaagattcttttctgtttctgttcctttgatggatttcataaattagtcatctggttgcgtaaacgaaagcatcctaataagacgccgtgaaaaaacaagcaaatattgaatgaatctaaaaaatagacatatccggaaaaacatacggcagttccacatttgggaaaactgttgccatgcacgcttctgctgtccccccatacgcgccagcagcaaaacggcatcccgggaaacagacaggaacccgtaccgcaacatcagtcctaagcatgaaccggatcatttgacaccccttgtgcaaatagcaaaattaaacggaaaaaaaccttaagctccatccatgaattccgccaatacccccttattggaaaccgagagattaatactgagaaaattcacggaaaatgatctggaggccctgttcaacatttacagcaatgaagaggtaaacacgtatttgccgtggtttccattaacctccctggaagaagcggcgtccctgttcaaagaaaagtaccaggaagtgtacaaacggccttacgggtatcattacgccatctgcccgaaaaacagcaaccttccggcagggtatatccacgcaggcacggacgacagccatgacctcggctacggattgcttcaggagttctggcacagaggctttgccacggaggcggccagggctgttgtcgcccggttgaagaaagacggcatgccctacatcacggccacacacgatatcaggaatccccgcagcggaggcgtcatgaaacagctgggcatgcgctaccaatattcttatgaagagctgtggaaacctaaaaatattccggtcactttccgcatgtaccagttgaatctggatggacaggaggatcgggtttatcaggaatactggaacaggtcatccgtccgtttcaaagaaactggtatttgaattcccaatacccggcctcatcttctagagttccttcccgccctgggaaacattgcggatacctccgcatccggtcacctttccaccggttttccggagaaagtcccgctccacggttcttccagcctgtccggaacgctttccaactcccggagtattttctcccgctcccgggaaatccgctcctgatccgcagaggccggaacagactgctccccggacagaggcatcagcccgtccgccatcctgccaccgtccggggcaaccggcggagcaacacccttgttgtcttcatccgtttccggttcaggacagaccggcttctgctcttccatctttccggaactttccggaacagccaggttccgatacaggaacaccaggtcccccgcctccacagcgccgctgcggatatccgcaggaatgcgcgcacgccccatccgctcctccgtcacaatcaggttggcaactctgcatttttcttcccgtcccggagattgggagataagcacggtccccggttcataaacattcccggccagagcaatcagcacataatgatgattgggatacacctgctccaccttgcccacatatacggggggaggggctgcttttttaacgggctgctgcacctgctgggaacaggaagcgcccagcactacaaacgccgccagaacaggcagggaaacaattcgtctcatggtgagttttttcgtcgtttcattccaccagcaccttgcgtggacggttggtattatccgccggggcaataatgccgcgggattccagcaaatccatcatgcgcgctgcacggccgtatccaatgctcaaacgacgctgcagcagggaggtgcttaccttacgttctacaacagccacttccaggcacttggcatagcactcctcctccgcgtcatccagcggactgtccgcacctccgcgggaaggctcgtccaaggacttctgaacctcttcatggaatttctgcttggcctgggaagcacagtgggccaccagggcttccacttcatcgtcagagataaaggctccctgcgcccgctccacctgggcggaacccggcggcaaatacagaaggtctcccttgcccaccagtttctccgccccctgcctgtccaaaatcacacggctatccgtaccgctcgccacctggaaagcgatgcgcgtcgggatattggccttgatcgtccccgtcaccacctgccttctgggcgtctgcgtcgccacaataaggtggatgcctgcggcacgggccttttgggtaagacgtccgatattcgtttctatgtccgctcctactgtctgcatcaggtccgcaagttcgtcaataataatgacgatgtaggggaagcgttcagggataactccgtcgtcctccagctccagttcatcatcttcttccacaggccattccccctgggattccaggtctctggcaatggattccgccaaagcttcatccacctgcccgtcttccggttcctccgtctcttgcgcaggaacatccggcgggcgcttgttgaaagcttcaaagtttcgcacacccaccttggcaaagcaatggtagcggtgctccatttcatttacgcaccaacgcagggcattgggaaccttcttgggatccgtcaccaccggaacaatcagatgcggcagcttggaataaggctgcatttccaccactttcggatccaccagaataagcctcagttcatccggacggaatttcaggagcatggaggaaatgatgctgttgatgcacacggatttcccggatccggtggcaccggccaccaacaggtgcggcatggatgccaagtccccgatcacggtgcgtccatacacgtctttccccagcgccagcggaatctttttcttgggggaacaaaaagcaggatcctgcaaaagttcccgcaggggaacggctaccttcttccggttgacaatttcaatacctaccgtatccttgcccggaatgggggccacgatgttcacgctttccgccttggtcgccagcgcaatatccttcgcatactggtcaaaagtatttacgcgcacgccgcgcgcgggatacacttcataacgggtgatggtcgggcctcgggtaatatccccaggcgtcacgtccacgcggaatgtcgtcagggtatcaataatcttctgctgtatttccagcatttcttccttgtcctctgccgtagggccttccggcttttcttcataatgcagcagttcaaagggaggcagctcatactcgcggaattcctccgtgggcggagtggacaatttggaaaaaggctgctctttaggcgcaggcttcatttccgccggttccgcaacggtaatcctggggcgcggagccaggggaaggcggccctgggtgcgcggggcgctgggaggcgggacagaatcctccggcttggacggagcaaccgccgccgcttcatgatacaaactttccagatcgtccccggtgcgctgcagacggggaacggaagcccggccctttctgaccggtctgggagcggacaaagcggcgtcttccatgctggccctcacgcgggcagcttccctggcaagcagagcggtctgtcgcgccagtcttttttccttcctgttcatacgccaggcacgccattcccgcagcatggcccggcaaaacggacggggacgcatcccgactgcataaaccagggccagcaaatagcccagcccggaaaaagccagcacagcggatctcccggccaacggaagaaacagaccagttcccagcaaatggcccgccagccccccggcgccctgaatctggtggcgtgccacccattcattacccggcacatgcccggccgtcagaaacaggcatccgaataacagcaggaacaaaccgccgtaaaccacgcttcggggcagccttccatggtggagcagacggtaaagcccccaccactccaacaggataaccagcatccaggccatggctcccagcatccaataaaaaattcccgcaccatataatcccgccgttcccagcacattggaggtacccggtataaccagcccggagccatttaaataactccagcctatttctcgcacatcaaatgtcagcatagcagccagaagagccgccccccccaacaaagacacggcaccccatgccattccaatccaaacaggggaacgcccctcttcatgctcaaatgcatgacgctcctgcatatccaatgccatacctgtttctatcctagcaattcttcgccccaaactcaaggctaaacagggaagaaaaagaatcgcccgaatccgcttccctcaagacaggaagtgcaaacttacggaccggaaataaggttttttaaacacttttgccactctggaagagtatcgctaggaattcctttttttacctgagaaaagaccgtccctgcaccgcaaatcaataaaaccgaatcaatttcaatgactatttttcatatccatttgattatttattgttagcctaaatatctattacaaaaaatataccgttcgacattttttcatgagttatgaaacatccagcgaatttcaaatccggtgtcaatagcaatcatttaaaaaaagattcttattcattattcccgagttcggaaaagataaaaaagttgtaaaaattatatggttaaaattttttttaaacgctaatcattatctagttatactaaatcataatatccctatttttttaataggatttgaaatccgctaattgagaatgctcttcctcatgacattgaaattacaatccgttaaccaggcacgactttcatgtgcaggcaagtcagcggccactccccggtattttgtccggcggtactgcttctgccagtatcttttcattattgatgattattttcccgctttttccatgtgaggggaaatatacccccctttttcaaacccttgcttgtttcaaacaaaaaaaatcaaaatcatcaaatttaaaatgatgactgaacatatagcggcctttttctttcaaacttccggaagattgaaagcatggagggcatcacgccatttccgtggtgcttccggggcaaggaagaaaatcctttgagccggaatggcctctttccctgtttttatcaccatctttcctcccaaaagcaacgtttcctcctccctcaccaaatgaatacaaacaacctcatcaataaagccattctgtgctccctggccatggccggagccgctctcctgccctcctgcgtcagccccaaggaagtcctctatatccaggatgtttccggaaactccagggaaaccatcaaggcaaactaccagacaaccatccagaaggatgaccagctctatatcgcagtcagcagcaagcagccggagctcaccgccccctttgccatgtctgaaatcggttcctccagcggcacctccagcaacaaacccaaaggatatctggtggatgcccagggctgcatcgtcctgcccgtcatcggcaaaatgaaggctgcgggcaaaacctgctcccagctggcctccgacattgccgctactctcaagaacaatgactacatccgagatgcctccgtcaatgttcagatcatgaacttcaaattctccgttctgggcgaagtcaatgctcccggaacctacactattgaaggacagcgcgtaaccattcttgaggccatcagccgggccggagacctgaatattgacggcaaccgggacgtcacgctaatccgggaaaccaacggaacccgccaaatcgccagtatcgacctgcgcagcaaggatttgttcacttctccttattattatatccagcaaaacgacatcatttacgtaacaccctcagaccgcaaggtcaacacgcgcagcgatgccgctcaatggtacggctggggcctctccgggcttggtgtcactctggccgtgatcgccctgtgcctgtaacggacattccgcttctttctcatccggcttaatcatacctgtgaacggaaatatagggacgatccgattgcatcggaccgcttccccaggggttcagtatttccaaacaacattccaccctctttcctccatggcaaataataccgctcccactccgcctgttacggaaaacacagaagaaacaacttccctggacacggtgctgctcgtcctgcgtcgctactggtttatcatcattctggcagccctcgccggaggtacggcggcttactacctagccggccgacagaattacatttaccagaagacggccagcgtcctgatgcgcgatgccaaaacgagcagtgacgcatcttcggaacgcattatggcagagctgggcatcgattccggcgcagccaacctggccaacgaaagcttcatcctcaaatccaccgcattaatgaaaaaagtggtggaagacctcaacctcaacacttcctattggcaaaaaaaagatttcagggaaatcgacctctacaaaaccagccccctgctggtccattttgaacggattgataagcaacgagcctgtaccctgcagatcacgcctctagatgaaaagaggttcatgcttagccattccaataaccagggggaatcagtccagctggaagggttttacggaaaacctcttacacttccctttgccgtcatttccatccatccaacatccctgatgaccgatgcgtggaatgaaaaaactgtcattgtccggcacaagcccgtgcttgaaactgctaacaacctgctccacggactgacagtcacccgtccggacgccaaagaatccagccttctggaaatgtccctgacggccagtaatccccagaaagcggaagacgtccttaaccacctcatccaggtttacaaccaaatttccaaggatgaacgaaacaaggcggcccttaaaacggaaaacttcatccagagccgcctgaaagaactcggagccgccctgagtgacgtggacaaaaagatcaccgaattcaagacgaaaagcgacattgtcaaggatacggataccaccatgagcgcggacttcagcacgtcccaggcgctggaaaaagaaattttcgatctcgaaacacaaatcaaactggcagccatcctggctgacaatcttaaggaaaccgaacgcaaacagggcctgatttccgtggaaaccggacttcccgattccggtattgcccggcagatagaacactataacgaagcctacctggaatatcagaaaattgcaggaagcgccggttcccagaacccaattacggtgagcttgcgcgacaggatgaattccaccagggcggccgccaataaagctctttccaactaccgtagcaatttgaatctcaagctcaaccagctcatcagcaaacggaattccctgactgaacgactcacggagacagcaagcagggagcaggaaatcattcccctggtccgcgaacacaaggttaaggaggaactttacctgatgctcttaagcaaggaacaggaaaacgccctggctatggcggtaacggaatccagcgcccgggttctggaaaccgcccatgggtccaactttcccatttccccaaaaaccattcaatacatcgcgggaggaacggcgggaggtgccctgttcagcatatttgccttcatgggagcggccatgctgaacagcaaggttaacaataaacacgatctcccgtccacaaacaggcagcctgtcattgccgaactgccccagatgaacaaaaaagaaagtagaaataccggtcttttcattcaggacgaacattccgtcatcgcggaatgcttccacatcctgcgcaataacgtagattctatgctccccaggccggaacagggaggacacgtcattctggttacctctaccctccccggagaagggaaaaccttcacctccgccaatctggccgccgctttcgcctatgccggcaaaaaagtactgcttattgacggagatttccgcaaatcctccctgacccggcgtctcggcggttccggacgcaaaggactcacttccattctgctccaacagagctccgacaccaccggcaccattcgccccctaggggaaaactcccgcggcatggatatcctttacaccggccccatggtacccaatccggttaccctgctcagtcatcctctgctgggtcaaatcctgggcatcctgaaaaaacaatacgacgccgttatcatcgacgctccgccctacggcattctggctgataccgccattctggcatcccatagcgatatcaccctgtacaccgtgcgcagcgggaaaatcgacaaacgatacctaacccagatccagcaactggccgatcagggaaaacttcccaatatggcgtacatcatcaacggcgtcaacttcaagtcctccagctacagctactatggctacggatacggttaccaatacggatacggctccggagaaccacggcaaaccaccaggaaacaaaattaataagacataggcaatgcataagcccaaggctttcttccctgctctttactcttttcggcagcaatcatgttcggcaacctgttcactccccggtatgcgacatccagcctctttccggacggcatggacatgcacacccatattctatggggagttgacgacggagccgcctgccttgaagaaagcctgggaatcattcgcttagctcaaggccatgggactcaaaggagcttactgcaccccccatatcatggcgcgctacccggacaatacgcccgatttcctgcgccgccgttttgaccagttgcttgccgacaccagggaagaacaattccagctccggctcgcggcggaatacatgctggacaaccagttcaatgagcagctgcgccgatacactcccctgacctacgacggaatccacctgctggtggaactgccccagtactaccttcctggcgcctggaaggacatgatcagctccgttcgggacatgggatacgtccctgtcctggcgcaccctgaacgctatggccgcctcctgcaacaggaagatttcctccaactggcccggcaggaaggcgtcaaatatcagggcaatgtcggctccctgaaaggattttacggcaaatccgccgcagccctggcacaaacgttccgcacccgtcaactttacgaatggtgggggacagatagccacaacatcgccatggccaaacgcatgcctctgaaaaactaactccgcctaccctattaacaacctctcgtactacacccatgtcagcccctataactaatatccccttcagcaacccgctgtatcgtaatcataatttttacagacgctacggaaaacgcgccctggatttcacgggagcactcttcggccttatatgcctgtttccggtattagccattctggctattctgctggccatcgtccagaggacatctcccttcttcctgcaaaagcgcatcgggcacggcctcaaaccctttcatatcatcaaattcaaaaccatgaaagacaccagggacaaggaagggaacctgctcccggatgaagaacgcacaacagtcttgggctccctgctgcgcagcacctccttggacgaactgcctgaactcatcaacgttctgttgggggacatgagctttatcggcccacgcccctggattcccgatcaaatggccatttttaccccttccacccggaaaaaaagaatgtccctgcgcccgggcatcacggggctggcccagattcgcgggcgcaacaacctcaccttccgtcagcgggtatgttatgacctgagctaccaacgccacctgaccttccggtacgacctgaatatccttttttacaccttcctcaaggttgtcgagagagaaggtattcagcagcgtccggatgccctgagtacaccggcccgtgtactgaagcccagagatttgatgacctacggattgaaagaaaatacgcaactcattttaagaagtatccgaaaagaacctgtcccctccttgagcgtacccgcccatcccttgatccccaaagacttgccgaccaaaggtctcagggcaaatacccagcttatcatgaggagccatcagaaaagcatccaataaatttcctccactccccccccgccaaaaatgaaaatttcagtcattacggtttgttataacagcattgcaacactgcaagacacgctggaaagcattctgcggcaaacctacccggacgtggaaagcattgtggtggacggggccagcaaggacgggaccgtggaattgattgaaaaatacagtcatcaattttccggccgcatgaaatggctatccgagccggacaagggaatttatgatgccatgaacaaggggataggcatggccacaggagatgtcatcggttttctgaatgcggatgactattaccaggacgaaaatgtactgaaagccatcgccagggcatttgcctggcatggaacagatgccgtacacggtaatctgcactacatcaacggagtaagggacaccgtacgcacatggcgcggaacggaatacagtcctggatccttccagcgcggctggagcccggcacaccccacattctattgtaaaaagggctgctttatccgttacggcggctttgacccctctatcggcagtgcggcggattttgagctgatgctacgttttatagaaaaaaaccggatctccaccacttatatcgaccgcgacatggtattcatgcgcactggcggctccagcacatcgggtctgcgcgccatcttgcggaatacgcgccagaacaaacaggcattcagaaaaaacaacctcccttacccgtggcattatgacatatcccgcatattccataaaatcctgtccttaaagagcccgttcctatactttatggaaaagaaataactggaaatcaaccaaacttcttctccaatcataaaaaacggcctatgaataacctgaaacagaatgctcaaaccgcagtcaaatggagtgctattctcacatttggcaaccaatgcgtaagttttctcattagtgttattctggcacgtttgctgactccgtcagactatggcctagtaggaactataagtatctttatagaaatttcgggcatttttgtaaccggaggactcagcatggcacttatcagaaaaatagaccggactcaaacagatcttgccaccgttttttattacaatactgctgtctctattttaatttacctagttctatacacttccgccccattcatagcatcctactttaatgagcctcttttaacagaaattacccggatttccggacttaccctgattacaggagccttgggagctgtacacggcacattgctccacgccaacatggaattcaaaaaacaaactattttctccattcccatctttattatctccgggattatcggcatttttctagcgtatatgggttacggagtatgggctctcgtgctacagggttttttatcttccgtattaacaactgttgcactttggtattttgtaccttggaaaccgagtttggagttttcatggaaatcctttcattcgacatttggattcggatgtaagctgatgatttcgtcactccttgattcctgttaccggaatgcctatcaattcgtcattgccaaaagattctctgcagcggatctaggctattatacacgtgccaacaccatggcccgcctccccatgtcttccctgtattccattatctccaaagttacttaccctttgatgagtcaaatacaggataatgatgaacagctccaacatgtattccggagaatccttcgcatgatggcatatatcattctcccctgcatgcttttgctcgtccttacagcatcccctctcgtttctgcgctcttaacagaaaaatggcttccttgtgtgccttttcttcaaattttatccctctctctcgcgctcactccaatgaacgccctcaacctcaatctgcttcaagccaaaggaagaagcgatcttttcctgcgtcttgaagtatggaaaaaaatcctgggcgtactgatcctgtgcgccaccatacctttcgggatttttttcatgtgctgcggcctccttcttttatccattctggaactgggaattaattcctactataccaagagactgattcaatatgggatcaaaaagcaaattaaagacattcttcccatcatcggcctcagcattgcctccttcttctgtgcgctccctgccttttacataacggaaaatccctttttcatcctggcaatgtcttcctgtatttacatagccatttttattctattatcgctcttcttcagatttcaggaaatatatgatttaaaaaacatggttcttaataaataaaatcatcccatatggcccataccctttccataatcatcccggtttacaacacttcggcatttttagagagatgcgtagaatccgtattgaagcaaaacgtggaaatggaaattattttgattgacgatggatctacggatgacagcccggccctttgcgaccgtctggctctttgcgatgcaaggatcaaggtcattcatcaggccaattccgggatatcttccgcaagaaacagagccctggatatttgcaaaggcaaatatataacgttcgtggacagtgacgatgaacttctggaagatacttacaagcccaatcttgaaattctagaacaaaacgaacatatcacagtcgttcaattcccatatatttatccgtacaatcaacccaatccccgcaaaggggcagattctgcacaaatgtgggaatgtgaacgtgacatcctggaagcctgcatgtctccagaagtcaatcacgccgtatggaataaaatattccgccggtccgtgtttgaccaactccgctttccagaaggcaccgtttttgaagatacttatattatccctgacctggcaaaaagaatcggttgtttatattcatccggcttaggaggctatggatacaaccttcgtcccggctcaataatggcatccggagctaacccacaaaaaatgcaggagcgtttccaggcttatgaacggatcgtccacgctgcctctggctatcctgatcttcacaattcccctctgtttgtcaattattaccatcaatgctttcttatgatggtggggattaacagaaccccaaaaaaaatctcctcccgttatgaagattctctcaaccatttccggaccatttcatgcagcctttcctccattttccggacgaaaaatcttccggtgaaagaaaaaatacggctggttttatcaaaaattgcaggaattcccctttatttaaaatatttttcataatctcccatgaaaaaaatattactatgtttctttattcaacttcgcggcgtatttttgaaaatatcatacctgttcggccgccatccgaaagtcctcaacatcaaagattccctgtcatatattcttaagcaccgcatatccatcagcaggtatggggatggggaaatacttctcatggaaggctatcctattggatttcaaaaagaggatgcggcattagccaggcgccttagggaaatagcccggaacccaataccgcaacaccgggtctgcatccctgatgttttttccggcatctcatcttacaataaagaatccagaaaattctggaaggattttttattccggggaaacggactgacccttttcaacaaatatttccagtccggcccctatctaaacacgcagatcagcagattttacgaacatctgaaagacaagacggaaactccgcaatacatcagcctctggcgccagattttccataaccgtcacctcattctggtggaaggtacaggttctaaactgggtttttacaatgacctttttgaaggagccgcatccatccgccgaatcgtctgcccggcggaaaacgcttttaactactaccatgctattctggaaacgacgctggacaaagcaaaaggaatggattttctggttctaatcgccctgggtccaacagcaacggtcttggctcatgatttagcggaacacggagtacaatctattgacgtaggacatatcgacatcgaatacgagtggtttcaaatgaaagcaacgtcaaaggttccggtgccgtggagatatgtcaatgaaacaggaaatcgtctttctgaactatcttccgacccggaatatacccgtcaaattattgctcaaatcggcctttcatgactccagattctccgcctcttgtttccatcatcattcctttgtataacgcagaggaaaccattgattcatgcctgcaaagctgcctggggcaaacctacaaaaacctggaaatcatcgttattgatgatggctcttccgacaattcccgggcaattgttcaggggtttgatcatgcctatccccagattcgcaccttcaggcaaaacaggggcggtgtcacggaagcacgcaattacggtatgcgaaaagctaccggacaatatttgttcttcatggatgcggacgatgatttaccggctcaatccctggaagttctggtagaacgggctgtggaaacccgggctgacatcacagcaagcaccactcttcacttgactgaaaagagagagctaatcgcccgaatgaactatatccctttttctaccctttccggagaagaatggctgacaaccatcagaaaaacatggcaaggccacctatgggggcttttgtttagaaaatcattgtttgagcatcctctgctttgtcctctctctcttaaaatcggagaagatcttctgcaagtaactcaacttgccatgcgcagtcatctcgtagccatgactccacaaacagtttaccattatattaaaagagaaacttccgccatcaattcgcgccagtttccttcagacattcgacaaggggatgaaatcttgtttgtagaaaccatgctccatttacagaaaaaggcttccacaagacgaatgcggacggaatgccgtcttctatccctgtttgcagtacttaatcttccgtcgtcaggttaccgcagcaaacttctccatcacttccgcacactctatttatcttatttgcttacggatcgccacctcatcaaaacgctctggaacatttctccccgcctccatatcggaatgattttggactgcatcaaataaaaaataccaattatggcctgtttgctatctaaaatatccttcatcagaaaaatccatcgttttttcttcagattatatttagaaaaaaaacggaagttgaatatcgtcaaaaccctgtggttcaatattagttttttaccatggaggcaggccaaacactttccgtttttcatacacggatcattaacggtagcacgggaagggggggctctgctccttgatattcccgattcagaactgaaaccgggactcattcgtctcggatatgattatgaccggttcagcactaactatgcaagcactttgcttcagctatccggtaccatccggtggaaaggccctttccgcagcagcgtcaatgtggtcattggcgccagcaagcctgagtcctttctggaatttggccgttatgttagtctcggcgcccagggttccatcagagcttaccgctctatcgtcattgaagactacgtcgccattacccatgactgctgcatttacgacacggatttccatcctttccgcaatatacggacaggaaatattaatccatacgccattcccgtaaaaattggtcagggttctttcatcagttcagggtcttatattgccaagggaacggttctccccccatattcgctagtagcatcccattccctgctcaatcgggactattctctggaaaatgtaaaagctccattcatcgcaggcatgcctggcaaaatcaaatcgcaaggacttgtacgtctctttgaaaaagacctcgaaataacagcctctgaacattttgcgcaaacagattgtcccttaatcgttcacaggggaataccgtctgatcattccggaagggaaggctctttcatatgatagccatgaaaaatatactcatctactttgattatcccatcacttccattcagggaggcacggaacaggcctcctttctcctggccaggctgcttgttcgccaagggttccgtattatttttctttctcttcaccctttcaaagaaaaaaataatgaattcccgcaatactccctgccggattccgaatacttgttcagcagacgcaatgccgattttacagaaaaactttgcgatgaacaaaatatcaattttattttgaatgaaggagccgcctccgactcatccttcttcttcagccacgcccatttgaacacaaaagccaccatcgtttccattattaacttctccatttgggaaggacttgatcatttcctgtccctcatccccccatccgggaacacatggccagccaaattgaaaacagctgcacgcgttgtatcggctccatggaaaaaatacatggccattcgcaaaaagaaagcaaaactaaatcatttgcttgaatattcagacaaagtggtcgtgctttctcaaaaatatattcaggactgccttttcctcacctctacccgtaatgcccacaaattatatgccatccccaaccttctgacattccaaattcctgaaagcttatctcccggtacaaaacaaaatattcttctttacgtaggacgcctcagttatgctgacaaaagagtagacaggctgctgagcgtatggaaaaaacttcaacctgtccataccgattggagtctctatattgtcggtgacggagaatacagagaaaacctggaaaaaatatccgaagaatatcatttgaaacgaatttttttcatgggacatcagaaccccgaacctttttacaaaaaatcaaaaatcgtatgtctcacctccacacatgaaggaatgcctatggtggttaatgaagcgttggcctacggatgcattcctgtggtttttgacagtttccatgccgcaaaggaaatgattccggatacggaaacaggcaggcttgtccctgctttcaatcttaagcaatacacaaaaaccctggacggcctgatgaaagaacgctacaggaggcccaactttaaagtattggacaattacaaagaagaaatgataacccgaaaatggcttcatgtcctgaaaaacggcaatgagtaacattattatttacctacctaacgaacctctgggcaaacagggcggcatggaaaaggctacccatcagttggcatgccttttacgagattccggacacaatgtcagtttgctctgtcagcaaaaaaacaggctgaatgtcccctatcgccctccggtccctcttattttcatcccccaaaaactgaataaaaaagagaaaaggaactttatcaacgatctcatccgccaaaaacaaacaaaactcatcattgaccagacggaaggaggcatcataggaaaatatggcattttcaaaaacagaaaacagatacaatcaaataaaataaaatttgtagcagtccaacatagttcccagtatacttatctgaaatactaccgctttattaaaaagaaacattttgaaaattccttttcaggcagactgaaaaatttcatctataacaatatttatttgaatataaaaaagttacgagcctgcatattgcagaaaaaactattccgtgatcttactctcaactacgaccggatcatcaccctttcttcaggaggaattgaagaattccaaaaaatttattcaaagactccttcctgtaaattaacatctattcccaatgtcattcccgatttagctcagaatatcccgccctgccaaaaggaatgccgctgcttattcgtcggcaggcttgataacgcagcgaaaggaatagaccgcctgctccgtatttggaaaatttttgaagaaaaatttcccggatggcatctggacattgtaggcaacggccaggatgcaagcatgttgaaagaaatggcacataagctgaacctcaaaaatatttcttttgaaggatttcaggagcctgaaccctattatgcgcgatcctcgcttttttgcctgacttccacctttgaaggctttgggcttgttcttgcggaggccatgcaacacggttgcgtccccctggcttttgacagttacccggcagccagagacattatcctgcccggaaaaacgggggaactgatccagccattcaatgaacaggaatacgcgaacaaacttatttctcttgctgccaacccggacgacttgggcatcctagcggaaaacgcccgtgagcatattaaagcattttccccaagtaagatatcagtcaaatggaatgttctcatacaaaacctatgaagcccaaagagcaatatctcgaagcatcggcctcacaataatagactaatgacaagcagcatgaaaaccagctacaatattctgattactacgacaggacttgcctctgtaggccaggggggaggaatttcctcttatgtccatgatcttgctacaggccttgtttccgccggacatcacgtcaccgtctatttggtcagggaaggaaaagaagtattcccacacaaaacaaattataactattcctttttccatattcctgccgaatatcggcaggaaaaatcagctgtcattgctctcctggattccatccggactcttgcccctgatattatcatcaacaatgatgtttcctatctgtccggcttatggccggttttagaccagtcaattgtcaaaatatccgtgatgcatggattttatcatggaaaaactctaaccaactttggcatacaaggtaaaatcgcgtgctgtaactggccatatgtcgactatatcgtttgccaaaaccagaccatgtgcagggaagcggcggccaaataccggattccttcggataaattcgtttgcattcaccagaccaactggaatcaatctcctttcttttccgaacacaaagagaaaactcagaattccatcaatcttatatgcgcctgtgggcaaagtaaaaacaagggagctttcatcatgcgctccctggcggaaaaacttatccattctcctttgaaatttcatttgaactggtgccttagcgtttctgaaacgtggcaagaacgtcttcaggatccacgcatcagtttccgtggcaatattccgcgggatgaatttctgcaacttcttgaaaaagcagatgctatcattatcccgacacttttggataccggccccatgctggttgtggaagctctttccaccggaaccatccctatatgcaatcttttgaaaagatcagctattccggatttgatagaaaacgggaaaaacggctttctgatccccaacaataaaattgacctgtatttcagggtcattgaaacccttgctgaaaacaaaacaatagccgcttttggcaagcgatgccatgcatatttccttaatcatctggaacccaaaaaacagctggagcagtatgcctatctttttgagcataagacggaaacgcctccctcccgggtcttttccgacgccgacgtaatctgtttccatttgcacaatgtatcaggctatcctcgttattcccgcaaaagaataatcaataaattgcttaccatccaggaaaagataatcacatacaaggattattcacgtttttttcgctttattcttgattaaaatatgaaaaaagcattccttctatttttattaaaattgctcccggaaacaagatgcttctccattaagagaagtcttctccgtctggttggctacgaaatagggcatgatgttcgtgtctgctcctctgccaggtttctgggtgcgggccatattattcttaaagaaggaacctggatagggcatgaaagcatgctggtctccacatccctgatttccgtaggcgccaaagtagatattgcccccaaagtctatattggtacaggaacgcacatagttgacccggtaggggaaagaacggctggacagggtatttccaaagatgtggttattgaagatggagtctggatcggcaccggcagcatactcctgccgggaaccagaatcggccgtaaaagcgtcatcgccgctggagccgtagtaacaggaaacataggaagcctgtgcatcgcagcaggagttccggccaaaccaataaaaaacatatcctgaatgcaaactatttttaaatatatttcacagcacggcgcatgggcatttttattcatggcggccatatccacttcccttctgggaccgctgaatcaattttcttttctttataccgcagctctgctggttcttcctttgaacatttctgctctaagaaaaataaccaacatcaattttcttataatttttttactcgctgcgtgttccgcgagcattattctggcagatcccgctgctattttcaagccatggcaacggctggtatatttcattctcctcctcttgacagtcagccctctggtttcatcaaagcaattggatatattccgcatccaagcctttgaatggtgcatgaacctatgtgtctttgtcggagtagcctccttcttctgctacttcctaggcatcaattacatgagaacaatcatcaacgttaatgattccttctcaggttcatttggcggaattacgccgcaatccatgcttcttgggccggttgccagcattgctgcgaattggcttttatacaaaatcttgaaacgatatttctctcaaaccactttctctccgctcattctgctaatgctgggaacctgtttgtgttccatgcttctctcatcttcccggggcgctttcctcgccacggtgatgacggcattgtacgtcctgttcatgtttactaaagaccatatacgcaaagctcccaaaatcatcttcgtgcttcttctatgcttcacagcagcatcgccccttatcggcaactttgctgacggcttgcaaaacaagcagcaagccaatatggaaaaaggcggaactttatcctcacgacaaagtttatggaacgaacgaattaaggaattcaagtcttctcccatatacggagttggcttctcttcccaaaaagaaatacgaattgatatacggactctgaataccggagccgtggaaccggggacctcctatggagctgtcttcgccatgaccggcctcttgggtggaatcccatttttaatgattcttgccagtcagatcctgaaaaaaccgtcagctgcattcggaatgcatgtcatttcgcctgcccaagtctgtcttgtattctttggaatgcatatgatggttgaaggctatgtctttgcggcgggaagtcctctctgcgcccttctatggctttccgtaggagccgcttccgcatggcagaataaaaatatcactaacattgtatgcctatgaaattcctcttctggcaaaatatgatcagcatccatcaaacagctcttctcaatgccttggccagcaaacaccaggtaacgctggccgtccaaagagcttttgaagaggaaaggacggacagtggatggaaaatcccggatatgggaaatgtccatcttgaactatctcctgatgaacagcgtattcatcaactgattctttccaatgaaaccgccatccacgttttttcaggaatagatgcctatcccatggttttccgagcattcaaacaatgcatccagctgaaaaggactacgctcatctacatggaaccctatcagacaggaggtatttccggccaactgcgccagcttaaatacgctcttctttatttaaaatacggaaagaaaattcaagccttgctggcaacgggaaaattcggcgtgcaagcctaccggcgctccggatggcctgcatccagaatatttgaatggggctacttcacagaacaaacgaaacattccgcagatgaacaaaataccgaccaacaaaacagccgaacagcccccagactcctgtacgtaggaaggctggacaacaacaagagaatcctccatttgattcatgcattaaaatcgttccgctttcaaattgacacttttaccgtcattggtacagggcctctggtcaaagaaacggaatccctcattcatgaagaaggcaacttccgttaccttggaaaacaggcaaatgaaaatgtcctgcgcatcatgcagtcccatgacctccttattcttcccagcatgtatgacggatggggcgccgtcatcaatgaagcgctccagcaaggcatgcgtgttttatgttccgatcgttgcggcgcgtcatgcctgctggacggcatacataggggaggaacattttcatggaatgaaaaaggcagcctggaacgggagctgcgccattggataagtaaagggccaattacgcaaaaagaacgaacaggcattgcatcctgggcaaaaacaaccatatcagggcaggctccggcctgctatcttacttccatcctctcattcattcagggtaaaacatcgtcccgaccattaccaccttggcaagataaaatatgactctatgaacattttacataccatcgcttctatggacgctaaagcgggaggtccaacaacctgcaccttcgacttagccactggtttgaacgctctaggatgccgaaccgacattctgactattgcttctgggaacagggccacctcttctattcaggccccttttattaaaaccgtcccttttgacgcaaaaacgcctcttcaaatatcccgccattgtagacattttttacagcagaatcagcaatatgatctctaccataccaatggcctatggctggacattaaccacgccacctgcgccgcggccagaaaattccgcaaaccctgcgttctttcctctcatggcatgctttatccccgggctctggaaagaagcttctggagaaaaaagctcattctttccttaggccacaggaacgatatcgcttccgctacatgtcttcatgccacatgccagaaagaaatggagtttatccgaacctttggttataaaggacctatagctgtaattcctaatcctacccctcctgtgaaatggattgacaccattattgaaaaccattcactaaaacgcataggttttctaggacgactgcatccagttaaaaaggcagataaactcattaaagcctggaaacaattaggtaacaaagtggcggatgcagaactgatactgatgggtgaagggacgccagaatatgagaagtatttaaagggtcttgcagctgaatgtaaatatggtcacattacttttcatgggtttgtaaatggtaaggccaaattccaggaactggccaatttgaaggttctgtgtcttgttagtgattttgaaaattttggcatgactgttactgaggctttgtctgtaggcactcctgtaatagccaacacgaccactccatggaaagatttaaatactcatcactgtggatggtggataaacgcaacagtagataatatagccatcactatagaaaaggctttgcatctatctgataaggaaatagcctctatgagtattcgtggcaagaggcttgtttctgataaatatgcggctgataaggtggctgaaatgatggctacactttataaatggttattgggagaatgcagtaaaccggaatttgtatatgaatgaaacaaaattgatttatcgcaatacctccatgcattaagcaaaaatcaagagaccgccacttaatacggaaaagaagtaaccatgaaaaagataattatatctatagttaccatagtatataatgatcataaccacattgaacgtactatacacagtgtcttggaccaagactacccttacatagactatgtaattgtagatggcgcttccactgatggcactaaagaatgcatatatcgctatgaagcgtttttaggaaccttgatctcagaaccggataaaggtatttatgatgcaatgaataaaggtttacaagcggtgaaaggtaattatgtactatttatgaatagtggggactgctttagcgatcagtcagttgtaagcaaaatcgtaaattacatcaagtcttccgggtattttccggcgctggtttatggcgattatcgggaatcttccgtagaaggtaagtcacccataataccttcacggagttataaaaaaatatggtatggagctttcgcttcgcaccaatctattttttataattgccagtttttaaaggagaaaggacttaagtatgacttgagttatcaaattgcggctgattataaattaaatctcgaagtagtgaaatatgccaaaggaaatattttacaagtccccatgtgtatatcggattttgacattaccggtatttccaacaacaaccaagcgttaggtttgacagaggctgacagagctagaaaagaggtactgggcatgtctctattagttaggacgagtatcatactggtttcatgtatcgcacgattcatgaagaagtatctgaatcctatttaccgaaccctaagaatgaagcgatgaaccttagccaatataaagaatataaaccccatttagctcgaagagccatatggtaccttatcaaccataccttattcagatgtctaaagggaagaccatttaaccctgttcgcatcgcattgctccgttgttttggcgcttcaatagataaggatgcatatatctattcatcatgtaccatctttgctccctggaacgtgaaaataggaagggcttgcattggacctgacacaaatctttatagtaaagatatgattacagtaggagatgattctgttgtttcacagggaagttgtttgtgcacagcttcgcacgatatttccagtttaatgctgcccctacaaaccgctccgataatgattggcaataacgtatggttagccgccgatacctttgtgggtatgggagtaaacattggtcagggcgccgtggtaggcgcaagagccgccgtattcaaaaacgtagaatcatggacggttgttggaggaaatccggcaaaatttattaaaacaagaacagtcaataatcatgactgattatccaccttttccaataaagctttctccttttaggaaaaaactcttaaacaccatgtactctcccgtcaaccgaatttcgatcccgatatttccatattttctaaaaaattccgttttttcttacctgcctttttggaaccatagtgggcttaacttgctccgtaagcatgtataatacatcatcaattagtcctaaaacgatgactgtgggttctttttcttcttcggccttgagaagtcacatttactgtacgagatttatccaacgtggcaaatccgttcgcatcggttgcaatataaacatgctccgagggcactcacaatatctattctccgaatttctaactaatcgtaaaacctaccatgattaaaggctgcctcaggattgtgccgggagacacggttctgtcaggtatattgctattgaaaaacacggttgcagctgccgaatcctcgatcatttcttccgcaaaaataaaaaatggtgccactaaaaagatccgacagggtttcttaaaaaagatgtattggacaaacttcccttcttactcattttcatgaatccggagttcagtaaaaaattaaaaattctctcttttatcagcatcattggggttctggtcgctcacagttattttgtggaaaacaatgcctgggaaatcaatgcatttattcaagattggattggctgtcaaatcgtaagattttgtattcctttgttttttttcatctccggatacctgtttttccgagagacaaaagacggggggggaatacagaaaatactgaggaaaatgcgtacgagggcacactccctgatacttccctatttattatggaatctgttatttttcctttccattatttttcttcagctcatccccgacattggatcaaaaatcaattcggattttctgactctgcttcaaacaaaaagtatcccggaattatttcttttcattttctgggagcaagccgctttccatttgtggtttcttcaatacctgattctttttgttctgttctgtcccatattttatgttttattccatagcaaatgggccactgtcgtcatatttctcatcctctgcgtaactataggaatttacggatgggggggagaaaacatgcagggattgcttgcttttttaatggggggttttatttcctataacggcatcaatattgaacggcaacagaacaaaaacgctatttttatcccttcggggctttatctcatatggtgcgctgtcaactgtttttatccggagtttcagttgccttttctgaatatgctcaggtggactcttggcgcttattcagtatggacgttatatgatttattttccgccaagaaaaactggttagataaaataatttcttgggctccttacacattttttatatacgtattccatgaaccatggataaatatctataaaaaggcaattacactcttccttcctcccctgaaacttctttatttgtttggctacttcacaacacctctcatcattctcttgacaagcatcgtcgtcgctcgttttttacagaaaaatacaggaaccgcatattctattctaacaggagggagacattgaaactcatgaatatttctgccattattctgacttataatgaagaaatccacattcgcagatgcattgagaatcttctttccgttgcagaagaaatattcatcattgattgtttctccacggacgcaacgataaacatttgcaaagaatataaacaggttcatgttattcagcatgaatggcccggcaaccaggcagagcaattcaactgggcgttaaataactgtcctgtaaaaacagaatggattctcaggctggacgcagacgaatatttaatgccggaaagcctacaaaaattaaaaaaaattacgactgatcttactccagaggtaaatgccttatctttcatcctggtccgttattttttgggaaaacgcatcaaacacggtacaggcactatccgtttggtgcgaatgtttcgtacgggaaaagcccgctatgagaatcgcctcatggatgaacatatgctggttcaggaaggaataatcaaagatacggacatagaattcgccgacaacaatctcaataacctggaatggtggataaccaaacacttaaactacgcgaagagagaggcacgcatcttgctggagcaggaacatagagaatgcacccctaaccaggaactaagcaggcattcccgaaataaacgcagacaaaaaaatatttatgcgcgcattcctcttttctggcgctcttttttctacttttgttaccgttattttttaagactgggctttttggatgggaaagagggctttttatggcatttcctccaaggatggtggtatagaactatcgttgacgaaaaaatttattcctttttaaaaaaacagaaataaatatcgcatcataatttttcggcattatttgctttagtcttgtttcgttgatctttccgatttttcatcggagcaatttgctaaatatcaatatctaaaatattctgaaaatcttacaccaagactattcttgcataattcctcaattttttattaatcttttgattagaaatcgggccgcccatctgccggatgaagtactaacgttccatcctgcttccggctcggcatgagagttattttatagttatgccgtcagtggaaaaaacaatggacagcattcgacatcccttcacaaatatctttcaaatttaaagtaaatcttcattaacatgaagcaaatcacttcactcagaggcctcgcgattattctgatcatccttttccacctcaatccggagcatttcccctacggctacttcggcgttgaagtgtttctggtgatttccggctacctgctcatgaagtccctccagaaacagcaaatgcaaatccgtctcggggaatttgcccgtaaaaaagtcttaagactttttaccccggttgccgtcatcgtcccgctcactcttctggctggcatgttctttctggactatacggacctggcgacagccagttccacaggcggatatacgctgataggcgccgcgaacaggttcctggccgtcatccagtccgactatttcgcgcaggattcctccggcaatccgttccttcacatgtggtacctggcggtgacggcgcagatttatcttttgttcgcggggggatgcgtcctgtaccgttaccttcccaaacgggcggccgcctctcttttctggctcaccggcatcgggtcctttctctgggcctattcctatcccattcacaacctgttgcaggaaatcggcctgcccgtctgggagcaggttcgccccacttcccattacatgacgctgccccgtttgtgggaggtttgtgcgggaattttgttagcaatatacccccccccttaagttcaacacgttgcgaaaacagcaagaaaaacgttctcctcttcctccttggaatgttatgcatcctcgtacctgccctttcccgtggaaaggacgtctccctctgctcggcggccgtagttttggggacatgcctggtgatccggtatgcagaatccggcaggctggcccactgcttcaacaataaacttctgctgtggattggaggaatctcattctccctttacctggtgcatatgccactcatcgcgttctatcattcgtggtttctccatgcccccggatggcccggaatgcttgccatcggagcggcgtccgcagtcctgggaggtctcctgtaccttacagtagagaaaaagcgcatgaagatgaaatggtttatccccctgtaccttttcgcgttgcttctatgcgttgcaggaaggcagacagaaggattccggaactacatcaaccaggaaatcaactccatttccagcccccagctgcatggcgcatcggaaatcaaatctcctgacgccgcccggggatttgataaggaagccatcaaattcaataacaacatctttgccttcgtcagcagatccgatttcaagggaagtgcggaacccggcctgctgcagctgggttcccctgccgaagccccatccatagtcctgctgggggacagccacgcctctgcggccttttgcggattggacgccgcatgcagggaattggatatctccgggatttacgtttcttccgtcatttccccattctggaacagggaattgcccgcgctgccgtttgatgcaagctactattgcgacgagaaaaaaataaaggccctcatggcatggctgaacgtccacccggaaattaaccatgtggtgatagcccagcactggagcgtccgttacgacagtaaaaatgtaatggactggaagctgaagccgctcccctccggagaacctgcctattcaaactccctccgtgcatttatctccgaactgcgggagatgggcaagcaagttatcctgctggcccctactccgctcatcaagcaaaatgatgtggccaaatacatcaggaacctcatacgcaggggtgaaacgggaaaaggccaggaaagccttacctgcacgcggcaaaaatacagggaagatcatgccgccgtacttcccacccttgaccggcttgaacaggaagggctctgcaccgtcctgcgcatacttccctatataccggaagacaggccgttcaacgcctatgaacacggggaaatcctgtacaaagatggcgaccatatgtccagcaaaggctccatcaagctcttccggtacctgaaaccccagttaaaggaagcactgaaaaaagaatccacggcatcaccaggttcataaaagccatagccgtgaacacgtctgccgcagctccggcggggaaacatttaaataaaaccggcttttgtggaagctatagagttttctttggaaaaaaatgcccttgcatgatgaataatgcgccaaatgtttaacactttttgtcatacattgaacatatctttccgtttcttttctggtattgaagatacacttgctaaaaataaaaatattgttattatatttttcccctctaattatgcaacataaaaccattattgctacatgtgcggccatggccgctttttccggcatggctactgccgatatccagcttcccctggatgttttaaacgccaataacggcggcaagacattctccgcccagctgggagtaggctacgctaccaaatacatcagccgcggtctggctttccagaattccgcaagtgatcatgccattcccctggaagccgtcggcgcctatcaactgaacaatcaatattccctgataggcggattaaaatatcagtggctgacggataatggtctggaacacaatgattccggcatttgcgacgaaggctcggccattttaggcatcagccgcaaattcggaaaatccactatcgcggctctgagttaccagtttgtccacggcggtatccccggaagtttcaacatccacaatacaggcaacaactccggcttccctgctttcagccacaataggccggaagaacacagcttcgttctggacattcaccatgacttcggcaaagggctggaaaacttcttctgggactgccgcgtacaatatacgttccgctggatgactggctggtggttcaccaatactctggggtacaagtatgacgtcaacaaatccacctccgtcatcgtggcgggcacctggaacgccactgccgactattttgacagcaattccctgaacgccaatggaacccagggcatttccctgacggtttccgcccctgtcaaggccacgaaagacctgaccgtgactccgttcgtgggtacggtctggctcggcaacggcggcctggcggccaaccaccgcggcgcttccgcccgtttcccctacagggagccctccaaggtttaccgcaatttcaccttcgtcgccggggtaggagttgcctacaccttctaacaatctgactgtcattcactcaaccaacgcaagctccggcatgtgccatcaatcatgccggagcttttcttaactccccatgcccctgtccgccgttttccacacttcctcccttcagaagcaagtggccgccctgagcgacgcattcgccatcgcaggagaattcctccattgcgacgtcattaacagcggccatatcaacatgaccttccgggccacctacaggaagccggacggcaccacccgccgctacatcttccagcgcgtgaacgatgccgtgttcccatgccccagggatgtcatgcacaacgtggaaaaggtgaccaaccacatccgctggaaaatgttccgggtgctaaaaacgcccttccgccagacgctgaacctgtactccgcgcggggcggccgcaaatacctggaaattcccggttccggcttctggcgctgctacaactgcatagaaaacacccacacgttcgacgtggcggaccatccccgccaggcttacgaagcagcccgcgctttcggcgctttccaacagctcctgtgtgacatgaatccggaggacatccatgaaaccattccgttcttccaccatactcgcaggcgctttgaccatttggaaaaagccgcggcagcagactcccacggacggctgaatacctgccgcaaggagctggacttcatccgccgccgtgaacgttatgtggacgtgctgctggatctccaggaacggggggagctccccgtcagaatcgtccacaacgacacgaaaatcaacaacgtgatgctggacagggagacggacaaggctgtctgcgtcattgacctagacaccgtcatgcccgggagcgtcctgtacgatttcggagacatggtgcgcaccatgacctcccctgcggcggaagatgaagaaaatctggataaaaccttcctgcgcatgcccatgttcgaggccgtcgtcaagggatacctggaggcctccagagaattcatcacaccgcaggaagtctccaaacttgctttttccggtctgcttatcacgctggaaacgggaatccgcttcctgacggactacctggaaggggacgtttatttcaaaacgaaaaaagaacggcacaatctgcaccgagcccgcacccagctcaggctggtggaaagcatggaagagcaaatgcccgaaatggaagaatgcgtccggaaatgcttccagacagttaacggctgagagggcatgaccggcattaccccaattttatgatagtaccggaacgcgggctggtgctatactgcggggcatgttaaaaaatatttctcccctcatcagcccttccctgctgaaaattcttgcggaaatggggcatggcgacgaaatcgtcttttcagacgcccacttccccggccataccttcaaccctacggtgctgagggcggacggcctgggggcggatgccctgctggctgccgtcattcccctcttcgaactggatgcctacgcaacgcccgtcatcatgatggccccggttccgggagactctctggaccctgcggtggaagccaaataccgcaaggcgctgaactatgacgggaaaattgagcaaatggagcgctacgctttttatgaacggtccaaaaaggcctatgccgtcgtcattaccggggaaacggccaaatacggcaacatcatcctgaaaaaaggcgttacccctctttcctgaccattggccgccagacaaaccttccatgcagtacgattttgacgaagtaattgagcgccgcggcaccggagccctgaaatatgaagcgctgcttccccgctggggccgggacgacctgattcccctgtgggtggcagacatggacttcagaacgccccccttcatcatggaagctatccgccgccgctgcgaacacgaaatcctgggatataccgtcaagccccgcgctttctttgaagccatcagggactgggtggaccgacgccacgggtggaaggtgaacgcctcggaaataggcttcgctccgggcattgttcccggcatttccagcgccatccaatgctttacggaaccgggggacaaaatcatgatccagcctccggtgtaccacccctttgccatgatcatccgggaaaacggccgggaaatcgtcaacaatcccctcattctggaaaacggccgctaccgcatggacttcaaccacatgaaggaagccgtgcgtggctgccacatgttcatcctgtgcaatccccacaaccccggaggccgcgtatggagtccggaggaattgcgccgcgtggctgaaatctgtacggcaaacggcacgctggtcgtttctgatgaaatccatgcggatctgacccttcccggccacaggcacaccgtattcgccactgtttccgaacaggcccgcatgaactccgtcacctacatggcgcccagcaagaccttcaacgtgcccggcctgggcagttcctacgtgatttgccagaatccggacctgttcgcgaaataccaggactttgtcagcggcagggagcttgcggaagggcacgttttcgcgtacgacgggctcatcagcgcctattcaggcccggaaggggaggaatggctggcccaggcgctggactacattcaggaaaacatccgtttcattgacgcggaactgcgccgccgcatgccaaaaatcaaggccatcatgccggatgcctcctacctggtatttctggactgccgggaaatgaatctttcccagaaggaactggtggaattttttgtggacggagcgcgcctggctctcaacgacggttccatcttcggcaaggaaggggaaggcttcatgcgcctgaacgcgggctgtccccgctccatcctggaacgggcgctcagccagctggaggaagcctatgaaaaccgcggcttccggcaacaacaatcacaaaattaaagacacgcatcacgctccccggcaatggaattcatttccggaaccatgtattggggaaattttcccggagacatccagccccgccgtattttctcctgttgagtcccttgcggagaacgctgcggcgcggtggaaagggaatatctgaacaaccccttccgccgtttcgcccgcggcccccccttactctcccatcccatgctgaaaaacacgcccgggataccgccatgactttgcttgcaaaacggcaggaaaggagtatcgtcccccgcatgtactatatcaccacggccattgactacaccaacggaccgccccacatcgggcacgcttatgaaaaagtcctggcggacgttctcgcgcgctggcaccggatgaagggggaggaagtctatttcctgaccggggtggaccagcatgggcagaaagtgcagcagacggcggaaaagctgggcattacgccgcaggagcatgtcaacaatatcacagggcaattcctggcgttgtgggaccgactgggcatcagcaatgacggatgggcctccacgacggatccgcgccacaaggcctgcgtgcagaaaatcctgacggacctgaaggacaaggggcagctttacaaaaaatcctacaagggattctactccgtgcgccaggaacagttcctgacggacaaggaacgggacgcggaaggcaacttcggcccggaatggggggaagtggtggaactggaggaagaaaactggtatttccgcctgaccgaccatgtggaatggatgaagcagttcgtggaaaagagcagtgattttgtccttccttccttccgcaaggcggaagtgctcaacgccattgactttgactcggacctctgcatttcccgccccaagagccgcctttcctggggaatcgaattcccgttcgaccccgaattcgtcacctacgtctggtttgacgccctgatcaactacatttccttcgccggctacctggcggagccggacagcggcctgccggaattctccaaactctggcccgcggactgcgaagtcatcggcaaggatatcctggtgcccgcccacggcgtgtactggcccgccatgctgcatgccatgggcttttccgacgaggaaatgcccaccctgctcgtgcacggctggtggaacatcaacggggaaaaaatgtccaagtccatcggcaacgtggtggaccccaacctgctggcggaacaattcggcccggaacctgtgcgctattacctggtgcgggacatcaccaccgggaaggacgccaactttgatgcggaccgcctggtcatgctgtacaatacggagctggccaacgacctcggcaacctgtgcaaccgctccatcaacatgacgcgccgctattgcgactccgttatctccggcgcggaggcatatgatgacgaagcctccaaagccctgcgcgccaccatggaccaggccgtcaccctgttttccaaatacatggacgacaacatggcctccgatgccctggcggccctgaacgcccaggtttccgcctgtaacgcgtacattgagcagcagcagccctggcagctggccaaggatgaagcctccgccccgcgcctccgctgcgtgctgcgccatttgctggaatgctgcgcccaaacgggctatctcatcggctgcgtcctccctgacgcctccgcccgcattctgggccagctcaacgccggggacctgttccggggccttacgccggccgcgctggagtggggaatcctccccgcagggcaccgcatcaatgatcccgcccccgtttttccccgcattctttcggaagaggaaaaggccaaactggctgaaaaagcggccagggcggcaaaaaaacaaggctgattcccgtgaattcctccgcatccttcgtcaaatccctgctggcccaatgctgcctgggcggcatttgcgagtgggtggtctgccccggcgcgcgcaacatggcgctgcttcaggtgctggctgccgcggaggatctggtgaaatggactcactttgacgaacggtccgccgccttctttgcgctgggccgcattcaggatatggggctgcccgtggccgtggtcactacctccggaacggcagcggcggaactgctccccgccgtggtggaggcctactaccagcgccgccccctgctcctgctcacggcggaccgcccggcggcctgccggggttccgccgcaccccaagccatcgaacaggcggatctgttcggcatttacgcacccacaattgacctggaaacgccggaaagcctgccggaagacattctgcaagactgggattacgcctcccccctccatatcaacgtgtgcctgccggatccggaccctgcctggaaccccggcagctgcgacctttacccggcggaacctccggaggaaaacggattccggggctccctggcagaactggcccgggtcctgcgcttcaaatcgcgcgacgggctggtggtcatgatcggcggcctggaccccacggaacaagccccggcccggtggctggccaacgaactgaaagcccccgtggtggcggacgccacctccggactccgggaagagctggcccatctggctctgacggacgcagacgccctgctgagggaacacccgcccgccgtcctgctcagattaggggacgtgcccgtgggccgcttctggcgcgacctagaggacattccagccacggaagtcttctccgtcacccgcaccggcttctccgggctggcccgcccctcctccgtcgtaaccggagacctggaagccattctgcatgcgctgggggatatagataccgtgggcgacgtcaacggcctgcgcgccatgaacaaacgcaggaaagccctgatggaggaactgctcatcacctgcccggaaagcgaacaggccatggtgcgctccttctcctgctttgccgcggacggagactgcatttatctgggcaactccatgcccgtgcggtactggaacagcttcgcccagacgtccatccccacggaaaacgtccgcgccaaccggggagccaacggcattgacgggcaaatctccggttttctgggggtctccgcccggtgttcccgctcctgggctctcgtgggcgacctgaccgccatgtatgattccaatgccctggcactccttccccaactggacaggggaacccgcgtcctcggcgtcatcaacaacggcggagggggcatcttccgcaccctcccgggagcagacggccagccggaaaccatgaggaagctgcttgtacaaccccacgcccattccttcaaggccattgcggaacaatggggaatgcgctacctgaccatccgcacggcggaggacttcgaccagcttgattccctggaagaaaacagccagacgcttgtagagctcatcccggacagggagcagacggaacagatccgcctccggctggccaacgcccaggtgtagacatgccttcaccaaaaacgaaaggaggccggtcttttgcccagccatatcctgcgattcttcccaaatggattgaaaataccagataaaaataacatttcctgcatctaaccatagggaaatttctttcttgccagacgaagggaagagactacattaacggcgattcatgaaaaatgaatctccattgggacgacggcgggagccgtcaggaaatagatggggaatccggttagaatccggagcagttccgctactgtaattcttccacaggaagataagccagaataccagcctgatggatgcctatgcatatggcgggaaaccatttgatagaccatgttcaccagaatcaatatccgctttggataaggagcgccccattcacggcgtcctctgttatttccggttccatgtctcaaccggactttcctgtttccggtatccctgaatgaatggaaccttcccatccggcggtctcgcaaccgccaatggcaagccttttttcaggaaaccggtgcatgggctgtgcgtcaacacaaagtccatacgaaacatgatgagtaaaaaacaactgctattactgctgccggccctgtttgcggccatttcaacccttcctgcaaatgcggcccacatccttacgggaggaggaaccggagctgtaaatgccagcggtacgggcatctccatgcaactgaaccagggctttacttctgatactgccctgcccggagccgtgaacctcgactccatacagctcaagctgacggacaaccggtttaccgcggacttcacatccggcagccttaccatggtggtattcaccaaaccggcgtcggacagcgcggactggacggtcgtcgggcaatcccgcacggaagaaaacctctccgtgaatatcggctcctacaccgacgttgaatttaccttcagcaacctccttctgaacacatcgcaggaatacgtcttcgccttcgtttctgacgccgccatgctgggcaggctgacaataggcacgagccttcaggcggaagagggagctgactccccattcagcgtagacaacggatttgcctacgcctccatgcaatcaacagccttttacagcggggctcccgtcatactctactacaatacgggcaacgaaacgagcatgtacttcccgaacatgatcgttaccgtcaccgaccccgaaagcgtccccgaaccggcttcatgcctgcttgtcacgctgtcgttcgcgggcctgctcgtctcacgcagaagaagataacctcgaaccgccaaactactggaatatccggtacggctacggccttctgcgattttcacaactgcctttcgcgcggagggaaaagccgtaccgggtcattgggcattccgcccattccccaacgcaggctcagggccttcacctggcagagctggctgccccagccgtcttccgcacctcgatctcccttgcatagggctgcaaaccggtacggaacttcagtccccggtgttccctatcatgtgggcgcagcgtacgttttcattcactctcgcagcattcaagcgcggttgaaaaaacaggacttctttctgtccagaactccaacccggcacaccagcagggaagaaccgtggtcggacttatcgtaaaacaggtatcagaattcctccttctccacatcctcattaatttgcagaaaaggatgttctccgccggatcacggtcgcaatcctccaacgtccggggaacggcctcatcccgccgctctcccggcattttttcccatcggcagaaaatccgccgggactgcgaaaaccgcccagacgaatgatgcacaaacagccaaagccgcatgcaacagggcagtatcatgaaacagcatgtccgccttaatattcatacggcaggaagcaccgggccgccctccccttttttccgcctccagaggcatttgacgcagtctccacctttgccattaaatacgttcctgcacggcatgaaaaaaaccgggaggaaaatcacatccgcccggtttttaaagccgtccggcgcaaacgccggaggcatgaggttgccggtcttccgccggaaaccagttaaaggtagctgcgaaccacgccggagacgcgttcacgagccgcggcaatgcgcttgcgcaattccagcgtgtaggcttccatatcccggatgggggattgggccaccccggaaatcatggccgcctgggctaccgccgggcactcccattcaataatgcggggatcaatgggcttgggaatcacgtagtcgatgccgaagctgagcggggctcccccgtaaaggtcaatcacctcctgggggacgggctccttcgccagatcggccagggcgcgggcggcggcaatcttcatctgttcattgatgacggaagcgcgcacatccagggcggcacggaaaataaaggggaagcaggaaacattgttcacctggttgggccagtcggaacggccggaccccataatgcagtcaggccgcgcttttttggcatcctggtacgtaatttccgggtccggattcgcacaggcgaaaatgatgggggaaggagccatgagctttaccatgtcctgcgtgagcagtcccttggtggacagccccaggaacacgtccgctccggtaagggcctcctccagagagaagtcttccgactgggagaactgcgctttcgtggcatgcagatcaatgcgtccggtgtggatcagccccttggaatcaaacatgtagatatgttcgcggcgcactcccagcgtcatgtagaacttggcgcaggaaatgccggcagcgccggcccccacgacgacaaccttcatatcctccagcttgcggcccgtcagttccgcagcgttcagcagggcggcgccggaaatcacggccgtgccatgctggtcgtcatgaaacacgggaatattcatctcctcccgcaggcgttcttccaccatgaagcattccggcgccttgatatcctccagattgatggcgccgaaagtaggttccatggtcttgatcgtctcaatcagcttttccggttccttcacgttcagctcaatgtcaaaaacgtcaatatccgcgaacaccttgaacagaacccccttgccttccatcaccggcttggcggcatccggaccgatattgcccagccccagaacggcggtgccgttggtgattacgcccaccagattggagcgaccagtgtacagggcgctttgagaaggatcctctttaatgcggaggcagggttcggccacgcccggggaataggcaagagtcagatcccgttgtgaaaagcagggcttgcagggcagcgtttccaccttgccggggcggggctgggaatggtactgcaaggcatctaatctaatatcggaactcatgattgtaatggaaaaacaaaaaatcgagccttgcttgcaccacagaacagacatgcattcaagtaaataatcaattaattgcgtcacacgctccggaaaaggaaaacctctttttacattgatagaggaccccgggtatgctagtaggtagccggataaccaaccgtctgtaactatggaacatacgccccccctgccttccggatttaatatcaacggctatcttatccaatccctgaaacagacggatcccctctgccatgtttattacgttttggatgccagtcatgttccatacctgctccgcgaattctgcccccaggggctcgctgtgcgcgacccggaaagcggaaaactgcgttatccggaaaacacggacattgaacgggaagttctcccgctgaaaaatgacttcgaagcccagttccggaccggttccctgtgggaaatccccgccttaggcaccctgtacctggcttatgccattcccggcagccatgccgcagcggaacagcatcccggcgcgggcatccccccggcggagcccctccggcgcgatcaacggctactgtccactcccggaaccggggcggcggccgtccatgcgggttcccttccccagcctcggaaaaagaaaaactccgccggcatatggctccttaccctgctcctgctgggaggcgcatgcggaacttattattacacccagacaacttcgggaaaatccggctctctgcaggaaccggccgccccccaacccggcagggaaaagaaggaagccaccaaaccggaaaagaaagccgtactgcccgccgtgaagacggaaacccctccggaacaggaaaacgccgcgcccgccaccccgaccggagacgcggaacagccggaaaaaacaccgccgtccatctcctccggggaaaggaacggagatgccccggacattttagaggaaaaatccgcgtcctcccctgcacaaactgccggagaatccggtaccccggaccatgacgcggcggacgggaaacagcaggaaccggaaaatcccgccaacaggaaggaagcacagggggcacaatctgccgtcacccctgtccctgaaacgcgtctacggggaaaagcctccaggcaaaccaccaatatgggagacgtcaacgcctatgtgaggaaattcgccaagcccatgacgctgaaccagtggaaaaagcaatacgccaacctgtacacaagctggttcggcaattccgaggaagtagccaaaggctggatcaccaccttcggccccctgggattccgagcccgcggtttggacgcctcctggccggacacgaacttccgcggcttcttccccaaaaccatgctggatcccaacggggaacccgtggcgaacctctacacggtcacccaggtgattgagggttcccccgctgaaaaatacatcaaggaaggagacctgatcctgggcattgacggacaccccttcaagacgtctcaaagcctggacgtgctttacggcccttatcagcaccaagacaggcgcggcctggacatgcacgcgggccttctgctggacaaggcggaaggggccggaaaaatcaccctgaatattattcccgcggaaagcgtggaaaaaatccagggcatccagcctctctggaaagaagtcttacgggaggaacgggcccaaaagcccgtttccctttccattccggtaaaaggcggccagcaggtgcgcctgcgcgtggatgacggcggcaacggcattggcagcgacggttttgaatggtcaggcctgaggctggaaggccccggcggaaccgttccgctgacccgggccctgcaatacaccgtaggttacggggaggccaagtatgaccccaaaagcagcgtatggcaggcccacgccgtctcttccctggtttttgacatccccaggggagactggaaactcaaagggacaggaacccccaggtggtctgcctccgttggcgtgaccgtacaggtgggaggctcctccactctgccggacgccgtgaagaaatacgtaaaaaacgtcacctttaaaataccccagctgggttcctatgccctcggcttccccaaaaactgcgccaagagcaaggcggttgtccacatgatgagtgaatggctggcggcccagcagcgcgagaacggttcctgggaacgtccgggcggctactgcggcaaccattatgatacgggctgggccgggctggccctgatggccacgggcaaccctaaatatgaccccgtcattaaaaaggcggcgcactacatcgccttctccggctcccagtgctggtgggccgtcccccaggcatccgcaggtattttcctgtgtgaatactggctgcgctaccgggacaactccgttctcccggccatccgcaacggcgtgcagcgcatgaaaaacgaagtcctttacggggacttcgtcaccggccacggcattcacccgggctaccggggaacaggcgtcagcatcggcggctcccacatgtgcctgttcctggcgctggccagcaaaaccccggcgcgcacggaagacgatgtgctggacaaaatgatggatcatgcccagtccatctgccccaccggcatggggccctacggccgcatgacggaaaccttcacttttgaacccaaccgcgaatgcgggggaacctactccggccgccatggcccgtactacattgcttccctcatctgcggcggaccggaactgtacaccaaaaacagccgcatcatgtacggtgaaggccccatcggcggctgtgaccagggccactcctccgagacgctctccatcatgtgggcccttcccgcctactggcgaaccaatccggaagtatattacaaaaacatggaggctttccgatggaaactgacgctgttgcgcccctttgacggcggcatgatgcagaaccccaaccgcctggaactgatgacggcggatcccgtcatcggcacctacatccgcaccagcatctggatcacggccctctgcgcggaacgccggaacctggcaatcacgggcaagccgggatttcaggcaaagacattccggaaggtgccccctgtcatcgatacggaatcccgcttcctgaatacctacgtgcgcaactggtccatggtaaatgcggcgcttggggccaaggcgcccgcctccctgaaatccgccatccgggaactgaaaaacattcctgtggaacagggctgccgctttaagcttatcaatgtcgtcaacaaccgcgccctccccatcgccaaggctatcatggaaattcccggggtggatcagctcaccagggccacctgcgcggaaatgatcttgggcatggatgtgcgcattttctttgaacccaagcgcaaggacgataacccccaacccggggaatattctctaaccgtggatgtccagcagccgctgggcggccgcgccctcgggcttcaccgcgacaaggaactggaaggaaaagccaattccgcctacaaatatgactttgcaagcacggtgcaattcagcgacacgaccaccttctcccccatggaaaccatttcctggacgcccaattccaaattcggcggacagtggaacgtttactcctacaaaaaggaactcagcggccccacccagccgggcgtgcagaaaatgaacgccaaaatcaaatggcgcgtcaatgacctggatgtggaatatgaccgccccatcgccgtgggcggctttgaagtgggatgcccggaaaaagccctctcagtcaccaactgcaaccatctgtgggttccgggcatcctgatccgggaccacggcaactggggatgctccttccatctgccggacggaacctacatttccgcggcctcccagggcaaccagatagaggtgtacgacaaaatggacaaaaagaaggaaacaacttgggtttccccgaatgactcctgcctgactcaaggttcccgctgcctgttccgcgtttccacggactggcacggcctggaatgccgtgtgcgtgaactgaaactgctgggcagttccacggaggaagttgcggactataagctgaaagcctctaccggaggccgtgtggatacggctaaactactggacagggacgctaccaccgttgaagaactggacgcgtccccctcggaagacgagcccctggtgctggaactcaccctgaaatcccctgccgccctgcgcgctgtggacatcaagattgaaaagggcaacaaccgtttagtcattgaagccaacaaaggcagcaagtggattcctattcactggggctccctgggggcctctactgctggcgtcagcgatgctcagaaagccatgtacgcgaatgaaccggaagtactgcgcatgctccagcttccgggcaatggatttatcaaatgcatgcggacgtttgaccctgtcaccaccaataggctgcgcatcaagctcttccagaagggcggaaaagtccgccttgcggaactgcacgtgtacaaggcaaacgccgtcagaaatatagctctccagtcttaaacggctttcatctgcggccaggaataacaaaaaaaacttgtgatgaggaaatcccggcaggggcgccaatctccgtgtccctgctggaaaaaccggacataccattttaaggagggaggaaattccctgctccatgccggagcggccagccaatttcttgtctattgacaccaagccgcgcctcccctatatttccttattatgttcatcaggacaacgctcctttttcctatcctttttctctcactttcaggatcttccgtcatggcgtcaaccccctgggcttctgacaggaactgggaactcgtttttgaagacaattttgacggctcatcgctgaacgcacacaactggagccgcattgattacgtaggctataatgccccggactggcgcaaataccaatcccgggacgaaagccttgtggaattccgggaaaaggacggcaactccgccatgaccctgtggggaaaatacggggactacaccacccaaaccaaccagaccgccccagccaggacatacgcctgcggaggggtatattccctgaaaaccttctccttccaatatggctacgtagaagtccgcgccagattcgactgcgtgcagggcgtctggccggccatctggatgatgcccaaatccgacagcatcggctggcctgtcggaggggaaattgacatcatggaacacctgaattacgaaggccgtgtttaccagacaatccactggtcgcaaaacggcgttcccaaccaggataactcccagggggtcacccccggttggaacgatggtgccgaaaaagcaaactggcatacctacgggatggaatggacggaagaaggcatcaccttttatgtggatggaaaagcaaccggttcattcaaaaagcccaataacgcaaactggccctttgacaaggacggaaacgaattctacctgatcatcgaccagcagattggaggcaactgggtggaaaacgcaggagttaataagggaatcgaccaaaatacgctggccaattccggagccgcattcgacatcgattatgtcaaagtctattcctcaagcatctacaaccacctcgttccggaacccgctgtggcttcgctgggcctgttgggagcggccttgctggcggctcgccgcaaaagaagctgattgcccacacaccttttccttttgttcctccctgccgcgagaataaatcttccgggacattcccggcatattctcaggcaaaaaccgtcattggcacctgcctcaatatttctggactggggatgaaggcagtttttctcctccgtcctcttccaggcggcatagagcctccgcacggcggaggcaggaatcccacagggaagccttttccggaaacgggaaacacagggagtcgctcagcttttccacccgtttgaaagaatcccaccggtcataggcgttcaaactttccaggcgggaagccagcccatccagccagggaagagggtcatggcaaatcaggggaagatcgcatccggccttcagggacaggaaggcggcgtcatccggtgaatactgcgtcgtaatcgcccccatgcacaaatcatccgtaaacaccacgccccggaaaccgagacggtcacgcagaagccccctgatcacccgttcagacaaggtggcgggataatcgggatcaatctgaggcagcatgatatgggcggacatgatggaggacaatgccggacacagagccagaaaaggcagcagatccgtcttgaacagctcccgttcatccaggccgatcacgggaaggctgaaatggggatccgccagggcgcgccccatgccgggaaaatgtttgccgcagctctgcacgcctccccggcgcaggttggaggcataaacgccgccgcgtgaaataacgtcctgcgcattgtctccccagcagcggccgggcagcgcgttggctgcggacggatcatggcaaatatccagcaccggggcaaaattcaggttcacccccaggtagcggagagctaaagccgtcaccgcgcccagttccacgatgccgccaaccgaaccgagccgggccagcgaagccggggagggcaaattcaagcccagggaagcggtgcgaaccacccgccccccctcctgatccacggcaatgacaggatggtggaggcaaagtttccgcagcgactccgtcagaccgcgcacctgctccacggaatcaatattcctggaaaacagaatgaacccggctagctgcaaacgccggatggcagcctcctcctccgcgcccacttcatggccgcttatgccgatcagggcagggagcatggacggaaaaagattaatggcccaacaaggaagtcctggtgtacagcgggtaaacgggaatgccgcgttcctcaatcgcctggcgtccgccttcctctcggtccagcagcaccaaggcggcggcaaccctgcccccttccgcctcaatggcatcaatagccttcagcgtggagcctcccgtcgtgataacgtcatccaccacgaccacggtatccccggcctggaaattgccttcaatgcggcggccgcggccatggtccttcggttctttgcgcacggtgaacacctgaagcgtcttttccgccccttccagagcgctggtcatgccgacggccagggaaatagggtccgcccccatggtcatgccgccgatagccgccacctccgggaaacggggcaaaatatcctccttcaccagcttccagcccagagcgcccaccagggtggctcctacggggtccagggctgtcatgcggcagtccacatacaaatcggacaccttgccggaagccagtgtaaaagttcccgtacgcacggatttttccaaaagaatgcttttaagaagatcgtattgttcgctcatgaaaatagggatggatgaaatggttcgccgtgtataacagatacccccggaataagcaacggataacagcatgcaaatcttgacaaaaaggaggacaggccccataacctgcctgtcattttcccgttcccatgaaatccggcatactggcgttagtttctatcagttccgctcttgtttcctgcacatcgtacgagaggcccccgctgtttgaccaaatcaccggaaaaattcagggaatgtccggacgggaagattatctgtccggggtgggcgccacctcaggcgtcaacacggacctgcctccggaagcccgtctgggccagggatattgggacctgcaggcgggcacccagggggaaaagcacatcatcattgacctcaagcagcagaaagtcttctactacgtgggaaccacgctcgtgggcgtttcccccatgtcttccggcaaggaaggctacggcactcccaggggaacatacaaaatcatccagaaagacgccaactacaaatccggcacatacggcgttctgcgcagcaaatccaccggagccgtcgtcaacggggattacaacgccagggctggcggagcgccagcaggaacctactttgaccccgcccccatgccctactggatgcggattacgggaggctacggcatgcatgtgggttttgtcaccggatatccggtcagccacggctgcgtacgcctgccggaggacatggccaagatattctttgaacacacccccatcggcaccaaggtcaccatccgttagccgcttcctgcgcggtctcgcgccgcagaaatgccacactttccggaaaccggcgtgtttcttattcccgccgtccggaagcgttccgtgctgataacggctcccgtttcatggcgcagcttcctcactccggcattgacaaacggctccgaacctttttgaatatacgggatctttgacctcttgattcgtcatgacaatccctcctccccctgccctgccgccccatttcaacataggcggctacaaaatcacggcgcttgtagaaagcggtccggactatcatctgtaccaggctctttccccggaaggccatgccgtcctgatacgcgaattctgcccccggggcctcgttacgcgcgacctggccagcggagaactggctgtctctccggaaaatgaatcccaattcgcccaggcacgggaagcttttgaaacccaatacgcagccaatgcagaaggcaagctgaggggattcggcaccgtgctcttcctttacccgctttctccggcgcagccccagtaagctgtagcgcatgcccaggctctccgccccgcaaaaaaaccacagcaaccgcaactgcggaagcccgtagtcggcgccgccatccccggaacgccgctgccgcgggtaaagcactccggaggatttccggtcatcacggtcattgtgaccgggatgctcgccctcttcggatttctgggctaccagatactcaaggataaagaagaacccgtcgctaaagctgttaccgtgcccgtaccggctccgcccaagcccaaacccaagcccgctccgccaaaaccggagcccgtggtggtcactcctgaaccggaacccgtggtggtcgctcccgaacctgaaccggagcctgaaccggagccgcctgctcccgacctttccccctccccggaagtcattgccatggaaaaggctttacgggaggaagctatcgcgtccaaggggaaattttctgaaaaactgttgaataaatatccccattacgcggaagcctacgtacgggattacgtgaaaaaacgcggaggcagtttttctccggattttgaaaaatggctgaaaaacacgaaaaacaatcgtgaagtcttcgccatgttcttcccgccggaccccagcgtcgccaccaatgtggctttcatgattgatgaactggggctggaaacgacggaaaaatatgaccagctcgttctggcgttcgcagtaggacgccgccgattcggcatgggagccttcgaccttacccatcagggccgttacgttgatgccctgggcaagctgaatgacctgagatcctccggagtcatgcctccgccagcggacctgtactgcgccgggaaaccgcccgtcaactggtatgggaacgcccctcgcaccgtggatgaggaatgctacaaaaaggtggaagcctatctggaccgcaaaaaaatcacccccaagcaggcctggctcaggaaataccccaccgtctcggaaattggggactccgccattacggaagacaacctggtaggctttctgcacgaatacatgtaccgccacggccagctgaggcgcaagagggatcccttccccactccggtggaattcttttcctacctggtggataaatatgaacattgcggtgatttgcgcgacgtggaccgcaagcgtgtggaatggaccggcgtttccctggaaggaacaccctggccggccatgatggccctttcggaaacgcgccctctgcgtgagtgcgacagcgtgtgggaacgctacatgggccagcggggcccgacccgcctgtggctatacggcccctaccgggcggatgacgataaggaaccgcccatcctgttcagctttgacccggatccggaatggtccagggaatccaatgaacgcaagctccatgaaggcggcgtgtgcggcaccatgtcccttatctcccgcaattcccagatcgcgcgcggcattcccgccgcccccgccgggcagcctggccacggcaacctgatgaccacccatttcaccggcaacggctgctggctgagcgtggggcaaagtgtggacaccctgaaagccaccacgggattctggtacttccgggattccaacgcaccgcgcactggcaatgcggaataccagtccggactggccctgtccatgaatatcgactatgaaaagttcatcgacagccgcttcgccatgaatatttacaaactggcaggcaccggctcctccacggaagagtcggccgacccttccgccacgctccccaaggaatttacgcagaccgccatgagaaccgtactcaaggccaacccgttctacacggaagcctggtacacgctcttcaagcaggaacctcaggacctcatgggagccaccaagatggtggatgaagtgagggaggccctgccggacggcatgggcatcagaaagctttggaaaacgcgcaaatacgtttcctccgtaggccgcggcgacaagaacggcaaggaaatgcttgccaaccatgccagggaatacgtcaatgtgctctgctccgtgattctggaaaatgccctgaaacaggaatatgactataagaccttccagtgggccgaactcatgtcctggctcaagtctgaatccaagcgcaactcctacccggagcctcaggccgcctatcagatagcgtatgccaaggcccagggcacagacaggctcaaaagaaccgtagacaggggattcaagaaagccctcaatttctaccgggacgacagcaacgccctgaaggagcccaaggatgtggatcaggaggaaatgtccttttccctggccgccctgtgccaggccctgcccaaggaagaactggtcccctggatgaaaaacatgctggacacctgtccggacgggttcaaatacaagcccaaaaacaagaaggaaacgaaaatccaccccttctacgacgccctgacgaaaaactacatgtctctggctgacggttcggaaaaatcccgcgtcaagtcggaaatgaaagaggcttccgacagaattctggagctttcccaggacaagaaaggcgatgggaatgggtcctccggacgccgccggagacgctgattccccgcttccgtgcacctctacgtccacattcccttctgccaccgtatttgcccgtactgcgctttcttcaagcacacgccggcctccacggacatgaaatcattcatccgtgctctgggcagggaggcggaatcccgcgcagccgctctggccacaaaccgcggaggggaaacggccacgctttactttggtggtggaacgccctccatgctctcggacacgcatctggggcgtctcatggaaaccctggatcgtctcgtgcccgtggacaaactggacgaattctcctttgaggccaaccccgccacctttacggaaaaaaaagtgcgcttctggcgcagcctgggcatgacacgcgtctccctgggcgtgcagtccctggattccggcatcctgcatctgctggggcgcgaacataccccggcccaggctctgcactccgtggaaatgctgaaaaatgcgggaatgccccatatcaacatggatctcatgttcgccattccggggcaaaccctctccatatgggaagccaccctgaaggaagctgtccgcgccggaacggaccatatctccgcctacaacctcacctatgaagaagacacggaattcttccggagcctgctgcggggggagaaaaggcaggatccggacgaagacgccgccttttttgaactggcggaacacatgctggaggcggcaggcttgcgccactatgaaacctccaactacgcccgggagggctgcatctccccccacaacatggcctactggaagggagaggactatgtgggcatagggcctggcgcggtcagcaccatcaacggcatacggtattccaacacgcgggatacggacgcctacatacgcagcacgctggaaaacggcctccccctttccgaacaggaacccgtcaccgaggaagactaccgcctggaacgcattgccctgatgctccggacggatgaaggattgccgctgaaatacattctgccggaatcccgtcctctgctggaacaataccgggaactgggcctggcggacatttccccggaacaaaggttcatcctgaaaggccgcggacgcctgctcgtggacgccatcgcagcggaactgtgctgacggatagtttttccgcctcagagatcagcagtctgcggaatccaatgcgaaccggacactggaataagcgggcatgggctactttgttccctgattttcaatatacaaggagcatcccgcaaaaaaagataccggtatctgcgtattcggattttgttttttcatcccggttctttgaaaaagggatttctttttgtgaccgtgcggctctctgcaaaaagattccatgcaacaggaatttcagcaaggggcgtttcacaaaaacaatccttcacgccgacaacacccacgtatctaatcaatctggaactggcgtgccatttttttcaaccaccagtcccggtgcctcatctcgtcccggctgcgttccagttcccgaagctcgctgccccgcatccctcccttcatgtagcgttcatccagcttgcgcgcctccgcacgggtatctttccgcagagctttgtaaaactgggcccccgtcaccagcccgccggctgcaccgctccggcccaccaggttcatgtaaagtttcttcagcctgttgtaatcctccaccacctggttatatttcaaagcggcgtactggtaacgctccttccagtcctccggccctggattgaccagacggtcatccagagaaccgggaaccggcgcggaagacggggatgccagccctccggaggataatgccgtaagcggcggaggctggggaacgggcctgcggcttgtcttgggaataccgccgaccgtcacggaaaagggggagcgttcctccagcagagcgtccatgcgtgcctgttccaacgtttcccgcagatgggcacgttctttctgcagggacgcgttcaagtcgcgttcttctgaaagcgactgcttcagcgaccgcatgccgccggacatttccgagtaaaccagcgcataagccccgatgcaccccagcagaaagcccaggcccagcatgatgcccctttcccgccacggtccaggactgcgttccggagccggttccggaatgtccggttccggctcatgggaaacagtcaggtaatgttccagagggccctcgtcaggcatgggctgattcagggttgggacgggaaaaacgcaggttcaagcctgttcaggacggatgcagtccgcgccgaaatacggcacaagcgcctccggaatccggatggagccgtccggctgctggtaagtttccagaagggccacatacagccgcggcagagccgtgccggaaccgttcagggtgtggcagaactggttcttgccgtcggcatccttgtaacgcaggcgcatgcggcgcgcctggtagtccgtaaagcaggaacaggaagaaacttccagatactgcccctgtcccggagcccatacttcaatatcatacgtcttggcggaggaaaaaccgaggtctcccgtgcagagctcaatcacccggtaatgcagccccagtttttgaaggatggattccgcatggctgcggagcacttccagctcccggaaggagtcttccggctttaaaatctgcaccagttccaccttgtcaaactggtggacgcggatcataccgcggttgatgcggcaagcgcttccggcttcccggcggaagcagggcgtatacgcggccatcttgatgggcaggtcgctttcctgtaaaatggtatcccggtacaggttggtgaccggcacttccgccgtgggaatcaggaacatctgctggtcttccgtgccgtacatgtcttcctcaaatttaggaagctggccggtgccttccatgcactcccttttcaccacaaaaggaacgcccacttcctgataaccgttttccacggtctgcgtattcagcaggaagttgatcagggcacgttccagacgggcgcccgccccacggtacaccacaaaaccggagcccgtaatccgcgctccgtcttcaaaggaaatcatgcccagattcgcggccagttccacatggtccttcgggttttcaatggcgggcttttctccccaaagcttgatttccgggttggccgtttcatccgcacccacggggcattccaggtgcggcaggttgggaatgttcatcagcagggaggtgagctgggctgcattttcctccgcgacacggtccagttcccggatgcggtccccgatttcgcgcacgcgcgcttcaatggaggaagtgtcttcccctttcttcttgagcatgccgatctgcttggaggtggcattgcgctcggactgcagggcctgcttttccgtctcggcattgcggcgcgcttcatcgcaggccagaacgtcatcaacaagcttccacgcgtcgccgctgcggggcttcagccgcgctttcacttcttccggattttctcgtattacacggatgtcgagcataacgcgcacagcttgcactccatccccccgccacgcaagccaaatgaacggcctttcatggaaaaacgttaccctttcacggaaaaacgctgcgcgcagaggcatgctttcccgaatgccgcccctttccggaaactgccgtttttcccgtgtcagacaatgatttttttccttctcaggaaaaccgtacagcaggaggaccggactctccatgtttccgggaatcatggacatccggcgccagggtgcattacaggaaggaccgggaaggaacttccccccggttccaacaggcggagttcctttcatcactatttgttcttgaagaatccgggcggcaaaggatagtgtaagggcatcatgcaacaaaccgcacgcgccgctgtcctgacagcaccaaagacatttgaaatccgtgaatatcccattcccgccatcggagacgatgaaatgctgatcaaggtggaagcctgcggcgtttgcggaacggacggccacgaatacaaccgggaccccttcggcctctgccccgtggtcctgggccatgaaggcaccggggaaatcgtcgccatgggcaggaatatcactaaagacaccgccggaaatcccgtagcgctgggggacaagatcgtcacctgcatcattccctgcggcacctgtgacgcctgcctgaatactccggcccgcaccaacctgtgcgaaaatgtgggcgtgtatggcctgatgcctgacgacgacgtgcatctgaacggctacttcggggagtacctcgtcatccgcaagggctccacatttttcaatgtttccggcatgacgctggaccagcgcattctggtggaacccgccgcagtggtggtccattccctggaacgcgccaagtcaaccgggctcctcaagttcaattccgtggtgctcgtgcagggctgcggccccatcggccttcttcaaatcgccacgctgcgcacgctgggcattgaaaccatcatcgctgtagacggcaatgactcccgcctggaactggccagggaaatgggagcctcccgcacgtataacttcacccggtacgcggatctgaacgaactgctggatgccgtgaaaaaggacaacggcggccgcctggcggacttcgtcttccagtgcacgggcgtaggcaaggccggggccaacgcctggaagttcgtgaagcgcggcggcggcctgtgcgaagtgggctttttcatggatggaggggaaagcgtcatcaaccaccattacgacctctgcaacaaggaggtgaccgccgtaggctcctgggtgtactccccgcaggactacccgaccacattcgactttctgaagcgagcctacggcatcggcctgccgctgaccaagctgatctcccaccgcttcaagctggatgaaatcgcggaagccctggaaaccaacgtccagatgaaaggcatcaagattgccgtcatctgcggctagccggaaaactttccatctctttccatgccgccgtttttcaaaaacggcggcttttttacgccatctttccccgtaaaaaaccactcagcctcccaaagattaattatcatcccaatccagaaaacggcccgtattgggaggacaggccatagcggaagcgattttttccttcaactgctccagtgcatcagggtcaagaaccatgggttcgctcgctttaaggcacaaacctttccggtacacctgcctttccaacgtcagatatttattgacgatgccattggaattcagggcggcgtcaacgacgaaatgcagcagataatcagcatctccaaggtaaaaatcaaactcataaatccaggaaaaacagtattcttcgtcctcttcgcaaatcatttccctggcaggaattccgtcatcatacagatgattgagttcccgcaacagggtcagaatatgctcacgcctccgcacggttacctggcatccctgctccccaaccatgccctgaaggcagtcgatgaccaaatcatcacactgttcttccatggcaaggagaacttcccggacctgcgcccactgtcgctccaatggttcctcggaatacataaaccgggcaaagggggaaggttcacctgccccagcgttccgtaatgccgccgtaggagtcaatgcggcggtcacggaaaaagggccagatgcggcggtggtcttccaatgcgtccaggtccaggtccgcgtacaggatggcttcatcgctgacgggagccttcgccataatctggccatagtagtccgccacaaaggactgcccccagaattcgctttccccttccgtccccacccggttgacggcgcagacatagcagccgttggctacggcatggccgcgctgtacggtttcccacgcgcagtgctgctgttcccccagcaggggcttttcctccggcagccagccgatggccgtggggtaaaaaatgatttccgccccctgcatggccgtcaggcgcgcggcttccgggtaccactgatcccagcagatgagcacgccgatgcggccgaatctggtgtcgaacgccttatagcccaggtcgccgggggtgaagtaaaatttttcttcaaacccgggatcctgcggaatatgcatcttgcggtacatgcccaggaacgaaccgtccgcatccaccacccaggcggtattgtggtaaagcccggtggcgcgcttttcaaagccggaggcaacaatcaccacgcccagttccgccgccagtttcctgtgggcttccgtcaattccccgggaacaggttccgccaggtcgaataaatcgcattcctccgtcctgcaaaagtattccgtggtaaaaagttcctgggtgcagacaatctgcgcgccgttggcggcggcttcacggatggcggattccgtcttttccttgttcacggaaggccgggcatctgcggacagttgaatgagtgcaattttcggcatgccccttccttaccccgtttcccttcccattccaagcagggaaaatgaacgcggcgcgattatttggtggaaaacggcccggaaagtgctatgaaattgcaatatggaacccgtcacccccactctgcccgacgacgacgtagccgccattgaccggctcggcgccatttacaaggagctttcctcggaattgagcaaaatgatcattggccagcagcgcgtcgtggagctgctgagcatcgccctgttttctcgcgggcatgccctcctgatgggagttccgggcctggcgaagacgctgctggtcagttccgtggcaaaaacgctggaccttagtttcaaccgcatccagttcacgccggacctgatgcccgcggacattaccggcacggacatcatccaggatgattccgtcggcggcaagcgccagttcgagttcatcaaggggcccgtgttcgccaacatcgtgctggcggacgaaatcaaccgcgcccccgccaaaacccagtccgccctgctggaggccatgcaggagcgccgcgtcaccgtcatgggccgcaccttcaccctgctccccccctttttcgtgcttgccacccaaaaccccattgaacaggaaggcacctaccccctgccggaagcccagctggaccgcttcatgttcctgattgaagtggactaccccacggaggaggaggaaatgcgcatcgcccgggaaaccaccggaacccggagcgaggaactcaagcacatcctctccggggaggaaatcatcttttaccaggatctggtgcgccgcgttcccgttccggaacatatttacgagtatgccgtgaaactggtgcgcgccacccgccccaccctggaaacttccccggaatgggtaaagcagtatgtagcctggggcgcaggcccccgcgccgtccagttcctgattcttggggccaagacccgcgccgctctccagggcagctacatcgtccgcagggaagacatagatgccattgtggaacctgtgctgatgcaccgcgtggtcaccaacttcgccgcggaatcccaaggcatcacgccccgtaaggccgtggcgcgcctggcggcggaaatctgaccgccgtcccggcatcatcaatcccctttccctgccccatgaaatacctgaatcacaacctgctcagccgcctggggaaccttcccctggaagcgcgccacagcatgacggggaacgtatccggccgccacagaagcgccagccgcggctcctccgtggagtttgcggaataccgcaaatacgtggccggagacgatacgcgccgtctggactggaaagcgtatgcacggtcggacaggtattacatcaaggagtttgaagcggataccaacctgcgcgcctacatcgtcatggatctttccggctccatgaattatcatccggagcaggtggagaccaagtatatgcgcgcgtgcaggctggcggccaacctggcttacatcgccatccggcagggagacgcggtgggactgagttttgcccggcagacgaaggacggcgccgcgctgcacatccccgcctcccgccgccccgcccacctgaacgtgctcatcagccagatggacacgcattccccgcagggggagaccgtccttcccgataccctgcatgaactggcggaacgcgtcggccgccgcgccctggtgttgattttctcagacctgttcacagatacggcggagcttaaaaacgccctccgccacctccatttccgcaagcatgacgtagccgtattccatctggtggaccagctggaaatagattttgattttgaccgccccatccgcttcgtggacatggaaggcggcggctccctgattacggagccggaccttatcgcggacgagtaccgggctatcgtggccagctatctggaagaaacgcgccggatctgcacggatatcaatgcggactaccgcctggtcagaaccggagattccctggaagacgtgctgaccggcttcctgatgggacgtcagaaaaagaaggcggccggataaatgcccggctgtctcacggaacggttgattgctccgcggaacggatgcaggatgcacccagacgctccccggattgcaggaagcgtctgtttttcatctctttcccttttttccattgtggatgcacccgttaaaatgatcgtgggcctgggcaacccgggcagaacctatgaagacacccgccataacgcggggttcatggtgcttgaccgcctggccgcccggtggggggccgtattcaaggcggacaggcagcgcaagtgcgaggtggcctgcggccccggcgtcctgctagtgaaaccctccacgttcatgaatgaatccggtctgtgcgtgggccccatgatacggtttttcaaactggatccccgcagcgtgttcgtcattcatgatgaagtggatttccccctgggcgtgatcaagctgcgggaaaaaggctccgcaggcggccacaacggcattaaatccctcatcgcccacatgggcacccaggaattcccgcgcctccgcttcggcatcggccagccccgtggcaaaggggaaatgatagggcacgtgctgggcaaattccgcccggaggaacgcgagcttctggacgtgatgcttggcaaggcggaggacgccgtgctgtacaccatggaacacggcattaccagggcaggcaatattttcaacgctgttccaggctgacagccgcatgaaaggccgtcccatttgcaccatggcgcatccctggacgggccggagagcgtttttcctgaagacggagcagcccgggctgcaggatgatacggctgcctcaggcgcccggcggcgtccaggaatactcagggggcgcgcatgccttcttttttcgcccgtccgccatgtacggtattgctaaacaaacgggaatccgttaggatttttgcaccttttcccctctcctcaggaccaatcctgcttcatcttcatggctgaattaagttcacaagctccccgcaggcacatgcaggccaacaaaaggcggcatcccaaggcaaagcccaggaaacgattctggagctttatccgaaagctggtcctgtggtgcctggtgatggcggctatcggcgcggccgtgggatacttcggattcatgatggcctggaaacgttatgacaactgggcggcggaatttgatctggaacgcatcaatgacctggaaaaacccagcattatttatgaccggaacggggaggaaataggccgtatttatgtggagaaccgcagctacgtcactctggacaaaatctcccccgccatgattaatgcgctgatcgcccaggaagattcccgcttccgggaacatccgggctatgacttcctggggattctgcgggcaggccgggagtatatccacaacagcggggacgccaaccagggcgcctcctccatcacccagcagcttgccagaaatgcgtatgacctgaaaaaccgtgccaaagccaggaatgagggcagctttggccgcaaattcgtggaaatagcgctggcgcgccgcattacggaacggtacagcaaggaccaagttctggaattttacctgaaccgcgtttacttcggcagcgggttttacggcatccgcgccgcttccctgggctacttcggcaaagagccggcggacctgaccacccgggaggccgcctccatcgccgccctgatcaaaaacccgaacggactttcccccctgaataatccggcgagcaatctgaaatggcgcaaccacgtgctcaaccgcatggccaaggagaaatacattacgccggatgaagcggaacgcctctccgccatggagctggggctgaatcccaagccgctgaaacgcggcgtctcccacatttacgaccgcatttcctcagaaatcaccgcatacctgggagaggagcgcgtcaatgccgccgggcttaaaatttacaccaccattgacaggcagctccaggaagttaccggaaaagccctggaacaggctctggaaaacattgaaaaacaacccggttaccgtcatcagaaggccgcagactaccacagcggttccgcgaacaagccgcgctatctggaaggagcgctgctggtggtggacaacaaatcaggcgccgtcctggcctaccacggaggcagggattacaccaagcgccagtatgacgccatcagggacggagcccgccccaccggcacctccatcctccctttcctgtatgctacagcctttgacacgggaaaaagccccgtcacccgcattctggacgatgccatcgacaaccgcctgacgggcatcggcggttcggaaggaatcctgggggaatggggggcggaaaactccaaaaaccgttatgaaggcatgattaccgcccaccgcggcctgtccgcctccaaaatcgccgcctccctgcgcatggggatggagatgggcacggccccgttcgtcaagaaactgacggatttcggcatccgcaagcccgtgagggaagcggggagcacggaagtaaaccccgtttaccgccccaaaattttcgtgggtacggagcctgcctccctgaaggaaatgacgctggcctacaccgccatcccgaacgggggttcccgccctcaggatatttactatctggacaggatagaagatgaaaacggccagctgatctgggaatccacccaggcgattgaaacccggaacaatgcccaggtacggaagggggccacatccacagccacggctttccagcttcacaacatcctgaattcctccctgaaaaacggttcagcccagcgcgttgccccgcatctgccgaaaaacttcaagggcggcgtgaaaacaggcaccacgtacgacttcgcggacaactggctgtttgggtatgacagccgcattacctgcggcatctgggtaggtttcctggaaggcaaaaagcccatttatcacggagccttctcgtcagacacctgcgcctccgtgctgggcgccgccatcacggaagcggaacggcagttccctgccggagaactggcccctccccccagcgtagagcgggtggaaatctgcctgaccaccgggaaaagggccacgcacagctgttatgacattgacccgtcggataaaaaataccgccgacacaccatattcgaatacctccgcaagggggattccagcctgcctttctgcgacctccacggggaggacgtctccgcacccgtctccaccttcacggcccagaaccgcattcttcccctgccgcccatcctgcccaccaggcccatcctccaaggggacgatccctaccatacggagctgaaccaggtcccggccaaccgcaactttgaactgctgggggctggcgaaaacgtgccggaagcgcaagccatttccgcagatcccgtttcttcagaccatacggatacaagcattacgctgcaggcgcccaggcccatcaccattcccgtgccggaattcatccacctgtaactttttcccctcatgccttccccatcccaggacacggtagcctgcacatgcccgtcatgcggcaacctctttgccgtgaaggcgtcttttctgggacgccaggtaaaatgccccatctgcaccgcttcagtcacagccaggcaggaagaaaagcccaggccggaaacggaagaacaggacgccgtcccctgcctctgccatatttgcggcaatccctttgccgtcagggccgcctgcgtaggcagccgtgtggaatgccccgtctgccactccgctgtcacggccgtcaaacgggaagaagcgctttcaacattcctgggccggacacctgaagctgcagagaaaacgcccggaaatccgaaacaaccggctattccgccatctgccgccggtgttccgcacacttccgcgtactccgctccgcatacaccgctcgcaccaaagaaaaagacggacaaacggaccatttccgttcacgggcctaccacttccggctccgacaaatccacgacaaaaatccgtaagaggaaagaaggaaacgccgctccggccattgccgcgccacgctgcgccgccctggccccggaagaaccggaataccgcgctgccgccgcggacaccatgcgcagcgaacgccggcccacctggcatatatggctttttgtcgcgggactggttctttcccttctgggcgtgttcatgttcctgcgcgggagggatatggaagcggaaaactccaaacttctgaatatctcagaccggttcgtggatcatgaagcgctcttttcacaggaagtgaataaagacctgctggagcaattgcagcagagggagcggcaataccggctcatagcccacagccgcagggaggaagaccggaaggcggaatccatttccccccatattacggcggccatgaatgaactggccctctactgcatggcggaatcggatgaagagaggctcaactacgtaatgaatcccgcagccgtagctcccaaaatggcctattgggcctcctacggccaatacaaggactacctgccccaggaagcgggcagaagctccaaaaacggggacctgcttcagatctccgtgctgatggacgacaacactatccgccctgcggttttcctgtatgaccggaattcaggaaaatggaagctggactgggaagcctgggagggctattcccccatgcttccggcggagctggaagccaaaaagccctccacccccgttcccgtcagaatcatcctaagcatgtccggcatttatcagccccctttcctggaggaatcctccgcggaaagctaccgcaacacgtcatatctcaacttcacccttgagttccccaacggggaacgcctgaatgcgtacgtggacaggtattccccgctggccctggaactgaccaggctgctttacaacggccccgtgcgcacctgcgtgctcatccgctatccggaagacctgcccggcaaccgggccgttattattgaccagcttctgcactccggctggatgagcgacgccacccgcaggcttcttccccccaataattgaaaatcaagaatcggttcccgctttccatgagttccaaagcactagcgcaaacacaggacaaagccctccaactcaacctggcttccaccatttacggcacctttgcggaaatcggagccggacaggaaacggccaactggtttttccgggcatccggagccgccggaacagtggccaaaaccatttccgcctatgacatgaccgtcagcgacaccctgtacgggccggtcaagcgctacgtttctgaagaacgcctgaaaggcatgctggactacgaatttacccagctcatcaaccgcctgggcccccagcgcggcaaagacacccgcttctttgccttctgcaatacggtaaaagtcaaaggctaccgggacaacggcccctggcacggctggataggggtgcgcttccagctgaaaccggaggcaaaaccgtccgacctgattattcacgttcgcctgaacgacccggaccacgaccgccagatgaaggacctgggcatcctgggcgtcaacatcctgcacgccgtctttttcaaaagggaccgtctggaggaattcattgaatccctggtggacaatctggatccccggctggtggaaatagatgtcgtccgttttgaaggccacggtttttccatggtggacaaccgtcttttcgcgctccagctcgtccagtccggcctgacgccggccaccctgttcctggcgaacggccaggtggcccaggcggcggatgtgctgtacaagcgccccatcgtgttgatgaggggcagtttcaaccccgtctgcaatctgcatctggaagtcatggcccaggtgaaaaaaaccttcctctcccacatcaatgagacgcaggcggaccgctgcatggaaatttgtgaaatatccatgaataacctgctccgcggcgatgatgtggaccatctggaattcctggacagggcggacagcctcaaggctctcggcaaaaacgttctgattaccaaaatggcccgtttcgacaacctgtccgggctgctggcgcgctacacgagagaacccatagccatcgccctctccatcggcctgctgaatgagctgttcaaggaaaaatggacggaggacattcccggaggcattctggaatccttcggacgcaccttccagaacaaaacgcgcctgtacgtctccccgtggctcaaccgcaaatccggggaattcgtcacggcacgcactttccgcgcgccggaacaatacgtgcacctgtaccagcacttcctggcgaacggcctggtggtggacgtgccctttttcaatgaattcctgctgcgccacacgccgcgggacatccagcgcatgatcgctgcggatgaagacatctggaaaacgctggttccggaggaagcgcaccgttccgccctccacttccgctgagttccttttcagcaggccgccccttcctccccgcggcacggccctcccaatgccgcggtctctccgttcctgaaaccggataatccggcacggcccctcccgcctgtcctgccgggcttcccgccactggtcaggaaaacttaacaattccgtaagattgtcttgccataaggcaggaatctcattaaggtctccgagttccatttttatcatgaataccattattatcggctcccaatggggcgacgaaggcaagggcaaaatgatcgatttcctgacggaatccgccgacgtggtggcacgcggccagggcggcaacaacgcctaccatactgtaattgccaatggaaagaaatatattctccacctggttccctccggcatcctgtggccggacaagctttgcgtcatcggtaatggtgtggtgctggaccccatcggcctggtggaggaaatcaatgaactccgcggccagggcgtgaccattacaaaagacaaccttctcatctccgaccgcgcccacgtggtccttcccttccacaaggaaatggacgccgcccaggaatccgccctcggcaaaaaagccatcggcaccaccaagcgcggcatcggccccacttacgcggacaaggcacgccgcatcggcgtgcgcatggcggatatgagggatcccgcgatttttgacgaagtgctgcgccgccgcatcaagatggcgaatgcggaaatggaacgcatgggccttcccgctatggatgaagaaaaaatggtggcggaagtaagcgccgccgcggatgtgctgcgcccccacatcaccaacaccattccggttatgcacgaagccgtggcctccggaaaaagcatcctctttgaaggggcccagggagcttacctggatgtggacttcggcacctatccgttcgtcacctcctccaacacctcttccgctggcgcctgcaccggcacgggtgttcctccgcacaaaattgaccgcatcatcggcgtctgcaaggcctacaccacccgcgtgggcgcaggcccattcgtcacggaggatgaagacatctccaaccatctgcacagcatgggccgcgacttcggcgccaccacgggccgcccccgccgttgcggttgggctgacggcgtgctgctgcgcttctccgccatgttcaacggttttgatgaaatggccatgaccaacctggacggctacgacaagtgcccggaaattaaaatctgcacgggttacgatctggacggggaaatcctggcttatccgcccgccacagtggatgaatgggaacgctgcaagcccgtgtatgaaacggtgcccggctggatgcaggacatttcctcctgccgttcctgggaagagattccggaacaggccaagaaattcgtcaaacgcatgagcgagctcatcggctgccccgtcacaaccgtgggcgtaggccccgaccgcgaacagacgattgccgtgcaataaacctcggcagttctcgttattatttccttcaaagcagttccgcatgcatggcggaactgcttttttattgtcagctaataaaggccgaacacacgtttcaacgctttctccgccaccgtttctccacggcagcggcatgggaaaaacttattttccaccctgcatctttgcatgaagcgcggaaatgcctcctctaaaacacatgaaaacgacaattttgccgcttccaggtcaggaaaaagcaaataaatatcatccaaaacagcccggcggaaaactggtgaagctaccgttggaaagcccatgcctgggagttcccggaatgatttgacggatacggatacttccctcctgatgataataaaagaggaggcgggatctttcccgcctcctgtaaaacagcaattggactccccggcttaggcacgtctgcggcgcatcatgagggcagccagaccaatcaggctgagggatgccgtggccggttcgggaacggcagccgccgcaatggcattaagattggcttcctgggaagcattagcctgcaacgtggtattatccacgacaaggtatttgacgtaatccatgccataggtaaatgaagtcagggctccgaacccgctcgctttcaaccctgaatcctgaccaccataagtggtggcggttccttcggaatcaaccagggtcaggtaagtccaggttccggtgctggtaatctgataagtgatggcggcggattcatagctgttttcggtgaacaattccttcaatcccgtattcaaattgagttcagaaccgttgacagaagtaatcgtgcggttgtagttctctccttgccaggaaccataaatgcccgccgtgggagttcctgaagaaacgtagttgaggcccaggccgatcatattattattggcggaaaaaatattcgccttgacgttacctgccagaatggcgttttggaaagcctgagcgtccagggccatggtcacggagaaattgccgtaaccggagtttataccctccgtcagggtatatgatccgcctgctgcctgcaattcactggaatccaaagtaaggacggttgccccctgaaccatgagggaagaagctactacacaagaaagcaaaaataatgttttcttcatttgactgttctaggttgaaaagaaaagagcgacgcgctctcccagtgcggtacatataggggatttagaatccgctgcgcacttaaatattttctccttctcataacatatttacctgtattcggataagatgaaataaaaaaagaccagaaattatatatgatattaaaaaacaactgattaagatgaattagacattgattttcaatatttgttattgttcccggattctaaattcgcaataaaaattacagagaaaatctgatgcttttttcccgttttacactccttttggctccctcacccgacgtacattcagacagccccctgcaaaaaacaataatctccctaagctaccatgttccaactggttccacttcttttgcggaaggaatacggcggtgggagctgcccctccgcttgccctatcatgcctgtcttaggaaaaggcccctgaaggacagcccgcctttcctttttccggaaagacggtgaaaaacggatattcgtgtcagcatttaaacggagttatgatacttccgggaaaagccttgtctgactgtctgtatgagacatgccattcttccctccatgtgcgctgttgccgtcgcagcctcctgcagtcccacccttgcccaacaggcggctcccgctgcggcggcttcccctgcttacctgaacacggaacgcggtctgcgcgtgaaaactctggaaggcagggaaataagccccagcctgatgaaaggaatgcgcccggaagaacaaatcaccaaaaggacgcccggcgttcccaccaggcccagcgtactgcttcagcatgaaggcggaacttccgctcccggcctggaatggtttgcggccaggccccttaaaatgatgccgtacctggacagttcctacgttttcggcaatacctgtgcggaaccgaacgcctggatacgcgaagacatgatttccaccggagcgcaaaagctcaagaccgctctctccagatacggcattacttattccgcccagttcggattcaactacacggggctgacgggcggcggcctgaacggaaaaacggatttcccctcctacaatggttccctgctaaccaatatcaccatcttccgcaatcattccacgggcagcggcctgtacctggcctccgagtttgacttcggcaacggctttgacttcaatgaaggcagtaaaggccccaaaaccacgctgggctccctccagaaccccaccagctccttccagggcccggacccccacctgagcaacctgagcctggcatgggtgggagcgggaggaaagcttctgctgatggcgggccagctggacaccaccaactacatggaccacaacgcttacgccaattcccataacaataacctcaccaacagcgttttcggcaataatcccgtactccccctgactgataattccctgggattccatttcgcgtggcagccaaccacctccttttacgtgatgggagccactgccgccaataacatggctcaaaaccacaatcctttccggaacctgaattccgacaattggacgaacgtgcttgaattcggctacgtggcggaagatttttgcagcatgggccccggcgtgtaccgcctccagccctttttcaccaccagcaacggtgaaaacgggggcggcgtggccgtaaacttccagcagcagctgggccgcagcagccacttggggtggttcttccgcggcggctgggcaagcgatgacgcagccacgctgaccggcgtacgctgcgcggccaccacagggctggtgcttctttcccccttccggggaaagggcgcatccaatgacggatacctgggcctcggtttcctctggcagcagggggctaaaaagaacggcccgtacgtgaacaggaatgaatacggcattgaattgacgtatgtggcccaggtgacgcccaccatgactctccagcctgatattcagcttgtcaagaatcccgtcaacggccgcagagggcaaacggcggtggttttccagatccagaacgtctggtcctggtaaaagccctcccggaaaactggaaaatattgatcgcatttcccggaaatcctgtctaaatggaaatgttcttatttggaccacgcacatgaagcgcattcagcaaccttccatgcaggaggcggagcaggcctccctgaatcatgagattttaaatacatggcgtcccggggaaactctgggggaacacatggagcgccgcggcgtcagcctacgcgaattcaacaagtggtgtctgaaaatgatctccctgatgggcgttgccactgtaacgggcggcatttccaacgcccaggagattgcggacaagatggccgcattgaaacgtcccgtagtcatctggctccagcttcaggaatgcaccggatgcctggaaagcactatccgcagctataacgaggaaatcggggacatggtgctttccgccgtctccatgccttacgtggaactgctgatggccccttcaggagaggccgccaatcaggctctggaagacgcgatcagggagccccacatcctcgtcatcaacggttccgttccggtcaatgacggcggggtgtactgcaccgtggccggagataccgtggagaacatgctgcgccattgcgcggaaaacgcctctcatatcctggccgtgggttcgtgcgcgtacttcggctccatccaggccgcccgtcccaaccccaccggggccgtgggcatccgggacatcctgacggaccgcacggtcatcaacgtgcccggctgcccgcccatcggggacgtgattacggccgtcatcatgtacatccttacatttgaccgcgccccggaatgcgacctggagtcgcgcccgctgatggcatacggcacccgcatccacaataattgcccgcgccgcgcccatttcgacgccggacagttcgtcaacgtgtttgacgacgagaacgcgcgggaatgcttctgcctgtacaaggtgggctgcaagggcccggatacgttctctccctgccccatcgtcaaatggaatggcggcgtcagcttccccatccagtccggccacccgtgcatcggctgtacggagctgtacttctttgaccgcatgactccgttttacaagacgctgccgaacgtgaacggcttcggcgtggaagcctccgccaacatcatcggggctgtgggcgtagccggcgccggagcggcaatcgccgcccatgccgtgggctccgccattcattacaggaagcagcacatgaaggaggaagcaaacgtctccctgcccgccttcggggacgctcccggctcgcccgacaaggaaattgaagaatagccagaagccctcaccaccagattaccatgagcaattacacatcagcggacgttccggaatccagccgggtggtcattgacccggtaacgcgcatcgaaggccacctgcgggtggaaatggaggccggggacggcgtcatcaaaaatgcctggacgtccaccacgcagtaccgtggcattgaggtgatcgcctgcaagcgggacccccgggacgtttgggcttttgtggaacgcatctgcggcgtctgcacgggtacgcacgccatcgcggccctggctgcggtggaagacgcgctccagtacccggtgcccgtccaggcccgcctcatgcgagacctggtcagcggagccctgggcatccaggaccacgtcatccatttttaccagctccaggccatggactgggtggacgtgatgtccgccctgaaggcggaccccgcggaaaccgccgccatcgccaagtccctttccgactggcccctgtcctccgccgcgtatttcgccggagtgcagaagaagctgaaggactccatcgcctacgggcaatattccatctttacgaacggctactggggccatccggcctacaagctgccgccggaggtgaatctgctgggcgtggcgcattatctccaggccctggtctggcagcgggacatgatcaaaatccacaccatcctgggcggcaagaacccgcacccgaacttcctggtcggcggcatggcctgcgccatcaacatgaacaatgaccaggccatcaaccagttttccctgagctacctgaagcagctggtgcaaacctgccacgatttcattcacaaagtatattatccggacattgtagccatcgccggattttataaggactacgcccacattggcgcgtccaaccccaactttttctgcactggggctccgtctgaaatcaacacgggcgcccccgcttataaaggcatgatcaagcccggcgtgcttctgaatggggattacaggaacgtgcttccctttgaccaggacaagatcagggaattcgtcaccagctcctggtacaggtatacggaaggcagggacgcgggcctggctccgtatgacggggagacgaatgcggactacaacggccccaggctgccctacaagtggctttccgaccacccgcagtacacctgggtgaaagccccgcgctatgacggccacgcgatggccgtgggtccgaacgcccgcatgatgattggctacgcccagggggttcccgccatcgtggaacgggtggatgccgcctgcgacaagctgggcctgccgcgcgacaacgccttcatgaactccacgctgggccgcgtgtacggccgtgcgctggacgccctgatcaacgtggacatgatggtggaccagctccaggaaatgacggaccgcatcaggaacggggaaacctccaccttcaacccggaaaaatgggaaccggaaacctggccctcctcctgcaagggcgtgggctgggtggaagcgccccgcggcagcctgagccactgggtgcggattgaaaacggccagacggtgaattaccaggccgtagtccccagtacatggaacagttccggacgggacgcggcggggcagatggggccatatgaatattccctggcccataccgggaaacacccgctggtggaccccacccgcccggtggagcccctgcgcaccattcacagctatgacccgtgccaatcctgcgccgtccatttgtttgacgaagaaggggaggccattctgaccagacaggacccgtgaaaacgactcttatcgataacgacctcaccctggcggtggaggatgccattccggccagtccggtgtacgctccggaagaaatcctggctctggccgtgtgcgcctcccccaacggcagcagggacgcgggagacctggccctgctccatgccgcgcgggaacgcagcatagccctcccttacgcccagcaggaaaactcctgggaggctccctcccgggaaaggccgtacagcacggctgttctgaaagccgcagacaaggcggacgcctcccctttcatggtagcccgcggcaatctgaaggcgctggaaaaactgtgcgaagtcagctccctagaaaaggagcgcatgaacaaggcctttgaagagcattccccctccggctttgaacccgtggccgtggccgtccaccggtccggcgcgccgtggcgcctgttgggcgtcgtgcccatgcacgccatgagggacgtgcgccgcctctccatggccaaggccaatttccgctatttccacgtctgggactggcctctgcgcgtgctgcactggacgtgggtgctctgcatcatcggcctgtccgccacaggcatctgcatcgcggaagggtggttcctgaaaatgggggatctgcacggggctttccaattcggaacgctccgcttcgtgcattacgcgctggggtggattctggtggtggtgatgatgctgcgtttttcctgcttcttcatggcctccaacaaataccagagtttccgggccctgttccccgtttccagacaggagtggaaggatttgtacgccacagcggtggactacctgttcgcccgcagttatgacggcccccgctacatcggccacaatcccctgcagcagtggacatacacgggcgtgtacgtcctgttcaccaccatggtggtgaccgggctggccctgtatgccctgtatgagccgcgccactggttctaccgctggttcatgccgctgaacgacctgataggcgttccgtacgtgcgcctggtgcatttgatcggcatgtggtgcttcatcatcttcgccatgatccacgtgtacctttccatcctttccgggaacgtggaccgggacggcaccatctcctccatgttcagcggcggacgatggctgcgcaagggcgtcaaattccgggatgaataacctctctgccctccccttgacatgaaattggagccatacacggaagaactgcggggctgccccgtgaagggaaatgcctatcccgtgctcgtgctgggcatcggaaacccgctcatgggggacgacggcgcaggcgtggagctggcccaccgcctccaggaacgggactacggcccgctggtccacgtggaggaagggggaacgcagggcatgaccctgcttcccctgctggaagatgcggacacgctcatcctgctggacgccgtcaggacgggggccctgccgggaaccgtcgtcacgcgcagccgggaagaactgccgcgccacttttcccgcgttatgtctccccaccagataggcatgaaggaagtgctgggggcggcccagctgtgcggcaccctgccgcgtgctatcacgctggtgggagtggaggccctgcatacggatttctgccgccccatgtccgcggaggtgcaggaagccttgccgaaggcactggacacggcggaggccctcatcgcccgcgccctggcggaacatcaggcccggaaaaacgcccatgcatgaagtaggcatcatggaaggcgcgctggacatggcccggcggcttatggaaaaacgcggaggaaacaggctgaggcgcgtgcacatgaccatcggcagcctgagcggcgtggtgccggaagcccttcaatccgccttcctagccctgaaagactcgtatgcggcgcaggatgcagccctggacgtcgcctgggtggaggccgtgtgccgctgtgacgcatgccgggcggatttttcctttacggaacacggctacatctgccccggctgcggagaaccggccctggccatcctgcgcgggcgggaactggagctgacccgtgtggagtgggaatgaatagtgccccttccgggaaaaataaaggaaatttacgcgaacactttccccggacggatggtctaataccattggagcgcatccatcgcgcctcaaacgtcaaaccaactatgtaaccagagccatgagcaatatcaacccattcattctaacagggatgatgccgctttcagcctcatccatgaaccgtgtctcctacatgtgcccggtcaccatcagcaatgatgtagtgcagggccagacggacattcaggattcccttaccgttgattccggcggaaatctttacatcatcaacgctcctgtttacgtgggcggccccaaccagccggaccacgggcaccgcaccgcccacctcgtcatccggaacggaggcgccatgacgctcctgggcaacctgccggatcatatgaccgttttcctgggggacaaagccaacggcagcctggaaatcaacggcggccgccttctgatgggccaggggcgcattcagggcaccagggagcatgaaggcagaatcgccatgacggacggctggctcttcgcctcggaagtggatctgccggcggagggctcggaactcgtgatcaggcacggcctgatgcgtatcagaaaactctccggcaatgcatccacccgcatttacggaggcgttctgcacgtaaaggaggaagcccgcgccagccgcatccatctgatagacgacggcgtgctgctgctgggcagcgtcaccagccagccttccgcggacgtcatggccggagcgggcatcaacttccgcggggacggcggagcgctggtaatccgcatcccccacccggaaaacgctctgacgcgcacgcgggaagcggaacatgtctttgacgaactgctccggaggggcaagctctttcatgacagtgaacccatgaccagcttccaggggttccatatgagggagttcacggggcatgacggactggcgtacgccgcgctgcgcccctccgcccagctggacgcggaacagaatcaggttacccgcctgctccatacgttcatgtacggcggcagtgaaaaggacatgcccatctgaacccctccggcaaatggaaagccctcatcaaaaaaccgccggcattccgtaccggcggttttttcatctgttgatctgctgaaaaacggaaaaacgttatttcaggaatttaatcgtgaagggagccacataatcgtaattcccgttcgccgccttgacggcagcgataatggagaaaacgatccaggcgataaccaccacgggggcgagcacgaacccgatcaggatcaaacatgaaagacaggccgcaaccgtataaatcgcccaggaaatctgggcattcagaatattctttcctactttgtccaccagagggttggcatccttccagaccagccagcagatcaggggcggaataatgttcacgccggcggagcctccgaaaaagacggccaccagcggagaaaccgccgtcaggatagcctgcgttttatccgattgtttctcaggggcgggctcctgaaccggttcctggatgatttgttgttcttcgtccataaaaataaagagatggaaagcggatgaaggagaacggaaaccttttccgtttcattccgccttgatgagaccttttttacatattcctccccgtagtcaagcttccagaccgtccgtcccctgaataaaaaacgttctccagcaatcatccttgccaccaagcagaccggaagccatactgccgggcatgaccaatgccctgacgctgctcgtcttctccgcctgtctgggagcctgcgccccgggaataccggaaatcccgcctcccgcttcttccgtcacccgccgtgaagccctggcagccagccgggcctatacctccatgatttggcggggctctctccggaatgtccgccacgggacggacggggacggcatccggacagacacgccggacgcctccgcagccggatatgatgccggagcatggtggaaaccgggcatgcgttccatcggcatgccgtacaaatggggcggcttcgacaccccgcgacagttctccgaacgcctgaaggcggatgccgccaacggagggcttcccgccgcggtcggcgacatgggcaccccggaaaagcaggccgcgggagacgccgccgtcagccgctttgccgccggagtggactgctccggcttcgtctcccgctgctggcggctggacaggcccttttccacacgggaactccccgccctctgcacgcggcttccctcctgggaagacctccggacgggagacatcctgattgcgccggggcgccatgtgctcctgttcattcagtgggagggaacggaaaagagcaggttcctgggcagtgaagccggccccctgccggcctggaaatgttcggagcatgtgttcagccgctccatgctggaaaacagcggttaccgccccatgagatacaggggcatgcgggactgaaaacaggttccggaacatccgtgcccctctttctttcccggaacaggaataagggggaagacatcgggaaacattccggaagttttcctctccccccttccataaaaagaaacccggcatcccatgcggcagggatgccgggctgcaggccgccccgtcaaaggcggcggcctggccaaatgccgggaattacaacggctgtacgttcatatggaacaccttcccctggaaggaggagccaagttccttcagaggcagaatgaacgtggaacggtgaactttgggacgatgcttgaatttgtccgaaaaatccttggacttgtcggaaaaattcttcagcacggcagttccggcaggttccccgtcaagcaacaggctggttttctccggttctcccacaatttccaccttgaccttcttgcctacgggaagcttggcgccgaaggaaaattccagagaatcgtcacggcggaatccgacggtgccgtccttcatgaccgcaagcaattcgccctcaggcgcggcaagcagcacctgctccttcccttccggagcggcagtcaattccagttccatggtcaggcggtaattcggccccagggcaggtttgtccagcttctggggaagggaggaaggcttcaccgtcaagggctggctgtctttccatttatgcaggggattggtgcgcggagcgttgccgatggaggaaaccagctcgcgatgctgttcaaacgtatccggagccttggcggttccccacagtttctggctgagcacgtccatggaaccggaaatgatcccccaaatgtcataaggcgcgtaccccgtatgcataatgtccgtttcatcattccagacagcgaaggtgcctccgaggagctggggatgcccggaaggcagcgtttcattgccgatgcggttgggaatccagttattgtacagccccttatggtttctgtccatccggtagtagccgacaaagggaacgatataaagggctccatcgttcgtattgatcacatcatagccctggttgacggcttcccatgctttcatccagccggtgctccaaaggttcatctggacccctttgctgactaccggggtcttgcccggcttggcgctgaggcttccccagatgcggggcgtataaccgcgcttgagggcatggctgagcacggcgtttgcaaaatggcggtaatcttccttgtccccataaaattcatccgcccccacatgcaccacgccgcagtccgcgaacacgggacggcccagtttgggatccttcagcatgtattcgtcaaaaaccttgctcaccaggtcgatcgtttccgggttggcggcgtccagcatctcgcagcggcgcttctcatgattcatgggccctttataaatgagatcaggccgcaggcgcgtaaaggaaagggcatgccccggcgtgtcgaactccggaacaatattgacgccgtactttctggcatagctgaccaggtcggcaaattccttcttggtataaaaaagatccctggctgtcaggggcgttccgtcctttcccttcattttggattccaggcggaaagccgcatagctttccttgaacggatcatggccgttgtccacatagtgttcgtggaaaatatagttgttgttgatgaccaggtgcaggtcattcatcttgtaccaggccatggtgcggatcacgtccttcaggtaactgagggggtaaggcgtgcacgcgacatcaagcatgaacccgcggagctggtagcgcggaaaatccacggccgtgccgcagggcacgctgccgggcgtctggcggagcatctgcagcagggtgcgcgtaccccagaacaggccggtgggagccgccgctccaaggcgaacgccgtccctggcaatctggagccggtatccttccctgcccagattgccgcccttcaacagggaaagggaaatatccgccttcgccccgggggcgacaagcttgaccttcttccccagcacgtcttccatatccgccgcaaacaatttgcccagctccttgtccgggcatgctatggtgaccgtattccccagcttatattctccctgtccccccttccattgcaggatttccgggatgatccgcggtttggggttaccctgggcggcctgaggagcctgcagcatgatttcataatccttgctgacggcttccttgccgtccttggtcaccttgaagctgacgttgacgggggtatctgaaataacaggggctatcttgcctttgctgttgacgagctgctcatagtcggcccccagcaatttaatctgggctccggaaacgctcggcatgggcagttgcttcgctccggctttcaccggagggatggaaagggaatccgcaatctgcttggcgtcctgccccatcacgggagacgcggcaagaacggcaatcatcaggaataggtttttcttcatgttttagtcttgtttaggaaaaggaaatgtctggtttgctccaaaaactacgcgcccgccgtccctttcttgcagagaaagggagaaaagcggaagaattctccctctctcaaccgggcgggacggacattccgcccaaacggattgccgcgcgccgggcttcatgaaggaaaaccgccgaccaagagaggctttccctcctgttccagtaaattattatcccaaagaacccgttgttggcgagataaaaaacgtggagccccgggctgcggataaaaaagatgccgcacggcggcaaaacgtccccccacggcagaaaacgggaaccggccgtccctatcagggcggccggttccggacaaaaaataaaatcaggcgcggatatcaatcacctctccggcgggaaagcgcaccttggcctcgcgggcataagcgtcatccttggcgcggtagcccagagccactcccaccacagagcggtacggcgtaccgtccaggcccaggatttcatcatacttggcgcggtccatgccgccgatcgtgcaggaatccacccgcagggcggcggcggcgctgagcaggaaccccacggcaatgtacacctggcaatccagccaggcatgcatcttttccggagccagagcctccacgtagctggtataaaaatcggcggaggaagccagtttttcagcggaggggcggcgcgtgaattcaatctgggccaggtaacggtccacatcccgcctggtggcgtcgcgccgggagcacagcaccacgtaatgggaacagtcctccacctgggactggttccaggaaacctcccgcagacgagccttcagttccctgttggtcacgacgacaaacttccagagctgaagccccagggaggagggactgagacgcaggctttccgccagcgcatgccaggtgggctgttcaagacgggcttcaggatcaaattttttgcaggcgtaacgccattccagaccgtcaatatactgttccggggagatcatcatgcagggtgagacacgaaaaacggaaaaactgtttaaagaacctctttcaatacctcaatgcagcgggcgttctccgcaggagtgcctatgctgatgcgtatccattccggcaggccgtaaccgtcctgcgcgcggacgatgactcccctggtaagcatatcctggaacacctgcttgccccggcccactttcaccaggataaagttgccctggctgggaatccattccaggcccatttcccggaaagcctgctcataaaaacgcatgccttccttattattctccacagtgcggcgcacatgctcccggtcctccagggcggccagggcggcctcctgggccagaacatgcaggttgaacggagcacgcgccttgtgcagcatgctgcaaaccggttccggcgcaatgccgtagcccacgcgcagccccgccaggccgtaagccttggagaaggtgcgcagaacaaccacgttgcggccttcccgcacaaatttgagggtatccggaggattgtcggaaaactcccggtacgcctcgtcaaaaaccaccagcacatgttccgggaccttcgccatgaaatcgtctatttcctgctgtcccactacggtgcctacgggattggtgggattcgtaatgaacacgacgcgcgtattctccgtaatagcggccaggaagccgtccaggtcatgcgtccagtcctccttgttgggcacctccacgtacgcggcgccaaacagcttggacatgatagggtacatggaaaaggcgtgtttggcggcaaccacctccgcacggggattcagcagagcatggcaaatcagttcaatcacttcgctgctgcctgtgcccactaccgtctggccgaactccactccgcagaactccgcaatagcggaacgcaggcggaaagccgctccgtccgggtaaatattcacgccggcagccgcacgggcaatcgcctccaccgccttcggggacggccccagaggattttcattagacgccagtttcacaatatcatggggattcaggcccagttcccgtgccgtctcctcaatcggcttgcccggctgataagccaccaactccagcacatgctgatttgcgaaactctcaatactcatagcggcggaatgttaccgccattccccgtttctggcaatacggatttccatccggccggcccctgggaagatgacagccgtttagagaatctgcgctgccggaaaagtggaaaccttttccggaatttttccattcttcctgcaatgcccttctaccggagaaaggcagccgtccactttctccggcagatttccgcctgctttttatgacggaccgcccaaatatgaaggagtacagccccggaattcttcaatgccccataaggtcaaaaacatttcccttaaaaaacggaacggcattccgtgacggacggtaaaccggccccctgccctcctattttttacggctgcggcccctgcgcgggcagctgcgcagggtctggtacccggccacgacaaaggcgaacgtagtcaccgccagaaaggaacggaacagccaggccagaagttcccagtaaatctcctgagtcatgcggaaggttttttaccggaatcgggaacgttccccaaatcttcccggaggcgtttgacggcacaggcaatcagggtggctttatccagctggcagcgttccatgttcagcgcgtccgcttccgcatcccggaaaaaatggaccgataacggcattttccccttgatttgaatttttttctgactcttttttttattttccgtcttcataaaaatccttcttttggtgcaataacggccttaacagccctcttgtgcccctacaatgcacctgaaacggtatttcagtcaacaaaaatataccattaaaatgactttatacaaaaaaggttgaaaaatagcaccattttcgttacaaagggtgcatgagtgagaatcaggacgaactcaaagtgcagatcaaggcttggctgaaacagcagaacatttcccgcaatgattttgcggcggaatgcttcgtgtctcccaacacggtccgcaactggcttgccaaggtggccatccccaaagacaaggaagctctcatccggctcatgatggaaaaaacggaaagggagaaaaaactgaaggaggcggcaagagccaattggaagccctttgtcgtcatgctgagttccgaggattacaaactcatcgaagaagccgccagaagggacaacatgacggtggaggaatgggcggaagccaccctgatcaaggacgcccagaagaggatgaagaattattacgacgacggcagccttccggaagatgtatccctggcggcggaagtaccggaagaatacggagctcccagacgttccggctcttcatcatctccgccctcttctgcccgccgcaagccgcggcaataaatcctggaggatatggcatcccactgatgtcccccctgcctgttggcttccgccagcgtgctgttccacggaaggcttccccaggcgccgggaacaccggtctcctttgttgtgcgccgaatcaacttttctcttgcttgccgttctccaaaagttctatttccgttgactgtgagtcaattattttatctactgcttcttcccgccttttgtttcccgctttcggcccgcgcgaaagcggttccgccgtctgttcccgccgtctccgtcaggatggtgcatccggacagccaggagctggaccgggaaaggagccctgttccggaaggatacacgccttatacatacgaattccgcgaccgccatggaaaaatgcagcgggaacggctgttcctgaaaaatacccccatcatcacggaatcggaagtggaacaggcaagaattgagccggagagaagagaatgcctccacatcaccctgaatacacagggcggaaaaaccatgaaagcggcaacctccgccatgaatctgggccgcgacaggctggccctcgtcgttcagggaaaaatcaagtcggcccccgtggtgcaggccgtcatatcccgtacttttgaaatctccggactggacggaaaaaatgaagcctccggactggcggaactgctcaaccggcaggcacccacagaaaaaaacacacccttcattccacaggatctggccctgtacgccgtccatccggaaagccgccgtctggtggaagaaggagtcctccgcgtaccgggcttcaggctctggaagctcccggcgcaccggcagggaaaaacgggagaggaagaatatctgttcctggggaattctcccatcatttccggagactgcgccaggcatgcggagacagatatggaacatccgggaagcctggacatcacctggaacgaagaagcattccgtaaactggagcgggaatcggccggactacgccccggcaaggacaggattgctgtcgttctgcgcggaaccattctgtccacccccttattccagggaatgccttcccgcaccactcttattcccggtctgggggatgacagctagctggatgccctgtgccgggccatcaacaacacccttctgccgctgacggaacagcaaaaacggcatgtgagggaaaacgtggctctttatcccatccatccgcgcagccgggaattggaacagcattttcttccggaacttctgcagggaaaatccatccgcctgaaaagcggattccattccatcccctatacctgccccgatttcccgaaccccgtccggacctatgtcttcatccgcccggaatccctcattgggccggaggacattcaggaggtggaacgcgaccaggatgaaacaatctcctgccaactgctgcccggggcatgggaaaaagcgttggctttcatgaaggcaaaccctgcgggccaagtggaggcggcagttgttttccgggggaacatgcgcctccggtttgaaatcaaaagattctcccttcaactgtgggggatgcctgtgctggattccatccagccaaattctttcatttaccttcctgagccggaagaagagcaacggatgtaccgggagtcctttcacctggcaatctacggcttcctggaacccgtttgcccgtggttctttaaaagctctcccgtgttccgggcatggggttcccggcgtccctttctgatgattgactcatccctgaaaggcccctgattaaaggaatcgtttcgtcgcacgcgccatgctgcgcttgccgtctaccggtatttttcacatgggcaagatacggcagaaggaacggggcaaaacgtttcagggcaaaataaaacaggacgatggccgcaaacaccagcaacggcgtgaagaaggcgaacaggctggatttcatggcgggaggcaggaaaccgtaaatgggccagtgcagcatgaacgtcaaaaagcaggcgggagctagcaaagctattttcgcagacaggccgggcaggtgcttttccatccagatgcctgcgtacataatcatcatgacacccagaagcatgccaatggccgtctctttccacagggggatcactccggcggaatacagcgctatcagtacaatgggcataaaaatgcttacccagaaaaaaatgccgaattttttattcatcaacagatgaatgtcgtcaatccgccgggaactgagcgcaacacccagcaggtaaaaagcacaggttccaatggaaatcgtctccgtgtgatccggggccgtgttaaagaaacagaaaaagaggagcaccgcaggaaacagcaggattttgacgcggaccagaagaggcgtcagcaacgtgagaatgataatgtccctcaggaaccaggaagggccgatggggggaacggcatgggagtcatctgcggagaaaaggttcatgcccggaagaaagacgtcccggatgccaattaaattctcaaggcggaaggaagcgccgtcatgaggcaggacaaggaacacgtacagtacattccagaacatgaacggaataaacagccagaaagcccggttaaaagccttgttccaggtgatgttcctgcccaggaagtaccctgccagcaccaggaaaaacggaaccctccccaggtaaaagagatggaggctcaccgcctggagaaagggggaggacaggtggacgtacatgatcagaagggctgcaataacccttgatacgtcaatccataagacacgttttgatggggggggggggggggataagcgtgtcaagaatcggaggctggtttggggagttatacacttaagcggggaaaaagtaatgcaggcgggtgtcaaagtcaagtatccggaaccttttcgggcatggactccgcatgggggcatccctgatttttttgctcgaaccggattcggagcttcgctatattggctcccgttatggcaacaccggattttcattatcaggatccttttcccatggaaaaggacgacacccaataccgtctcatcacgtcagactatgtgagcgtaggcgactttgaaggacatcccatgctgaaagtggaaccggagggactgcgcctgctggcagcggaagccttccatgacgtggcctttttcctgcgccccgcccacctgaagcaggtggccgccattctggacgatccggaagccagcgacaatgataaaagcgtggccctgacgatgctccgcaacgcggaagtggcgtccgccggcatcctgcccttctgccaggacacgggaaccgccaccatcgtaggcaagaagggccagcaggtatggaccggctgtgacgactgcgaacagctttcccacggcgtttacgacgcctatacccagaacaacctgcgctattcccagacggtggcgctggatatgtacacggagaaaaacaccggcaccaaccttcccgcccaaattgacctggaagcggtggagggcatgaaatactccttcctgttcgtcgccaagggcggcggctccgccaacaaaacttacctttaccaggaaacgaaggccctgctcaacccggccacgctgaaaaaattcctggtggaaaagatgagtaccctgggcacggcggcctgccctccctatcacatcgctttcgtcattggcggaacctctgcggaaaaatgcctgaagaccgtgaagatggcttccacgaagtactacgacaatctgccgactacggggaacgaacacggccgcgccttccgtgacctggaactggaaaaggaactgcatgaagaagcgtgcaaactgggcctgggcgcccagttcggcggcaagtggtacgctctggacgtgcgcgttatccggctgccccgccacggcgcctcctgcccggtgggcctgggagtctcctgctctgcggaccgcaacgcgaaagccaagatcacgccggagggcatctttattgaacagctggaaaccaaccccggccagtatattccggaagccctgcgcatgacctccagcgaagctgtctccattgacctgaaccgcccgatgaaggaagttctgaaagaactgggcaagtaccccgtcaccacgcgcctgagcctgaacggcaccatcattgtggcgcgcgacatcgcccacgccaagctgaaggaacgcctggaaaagggcgaagggctgcctcagtatatgaaggatcaccccgtgtactacgccggcccggccaaaactcctgaaggctacccctccggttccttcggccccacgaccgcaggccgcatggattcctacgtagacctgttccaggaaaacggaggctccatgatcatgattgccaagggcaaccgcagccagcaggtaacggatgcctgccggaagcacggcggcttttacctgggctccatcggcggcccggccgccattctggccaagaacaacatcaaaaaagtggaactgctggaatacccggaactgggcatggaagccatctggaaaattgaagtggaagatttccccgccttcattctggtagatgacaagggcaacgatttcttcgcgaaaatccgcgaaggatgggcctgcgccggttgcgggcattaagcctgaaccgggaaaaagatgattcactgccggagtctttcggggctccggcttttttatgtcccgggttcagccctcccagtacagacggcacgaatatccgggaggaaacttccggaatgcttcatgctccccttcacgcaaacaggtaataaaccagcatcagcgccagattggtgccgccagccagcatcaccccgcccggcttcaaatacggcgcctttccaagaaagaccgccagtaccgcaaagacggagtacagggatatccacatcagaaaaaatgctgtcaggttccgcccgttcccctgcccgtccaggggcatgttcccgccggggaaaaggaacggcaacgccggaaacacggcgtaaatgacatatacccagttcttcactatcatcctgaaagaaaccgtcagcggttccctgccaaacaggatattacgggagcaggcgttccgcgtcttttccttccgcagagcgcagggcaaatagaagggtagaagcatcagcgccaggacggggcctgcatataaaatagcggccattcccgctacgaaagcgaagaaagcgacaacaaggacaggcacgcctgccatgagcaggaaaagaaaggctgtcctgcgctccgccttctcccccattttcaggaaagaccatgaaagataagccatagggtaaaaatatggttttttaaagtttgccagaaacaggggccgtgcgcaagggaaagccgcccacggagcatccggagcagcaaagccccgtccctccgcacgcggcaggagaggaaccagacagactctgattgggattgccccgcacccgcgcccacgttatcctgtctccatggtctaccgaatttgcaaatccatcgaactggaaagcgggcatctcctgtccaaacatcccggcaattgcaaattcccgcatggccatacgcgctccgtggaaatggtgttccgggcggaaacgctggatgccaatgacatggtggtggatttcaaggccgtcaagcaaatgatgggggatttcctccagcagtttgaccactccctgtgcgtgaatacggaggaccccaattacgccgccttcgtggccgcatacggggagcgcatcattcccttcgaccgggaagaccccacaagcgaggtgatggcacgcgtcattttcaatgctgcccggcacgcgctggaaaaagccagggagaaccccggcgaatatcccgtgcgggcctgtgttgagctggaacgcgtgcgcgtgtgggaaaccagcagctcctgggcggaatacggagaataactgaaacagcgcgcttcccgccgggaggaacgctctgcaaagattcccggccccgcggaaggcacggccgcaatgcagccccctggtgttcatcccttaaaagggattcaggcagatcatgcgcttctgcgtccagtgcccgtaggtggaagaatacacatccgtaatttcccgggcccattcgtcaatagttcgctgatgatgggcgtattttttaaaatccttggtgtccacgcccagcagggagctgtggtcttcctcataatccgcaaattcggagacgatgcggccggactcatccctcaggcgtcccgccatggcaatgtgccctttcttgatgaaccgcttgaccagccctccccccttgatgccgctcagcgccgtgacaaagatgccggccctggcatttgtgggagtgatggaaatgatggcgagttccagcgtataagcccccttggttcccggaggcaccatttcaaaatgcggattttcggcaacctccttttccatgctggttgcaacgctcttctggaagtattccgccaggctgcgcagggcatcaaacccttccgcggtatccggcctcacatccatgtgcaccgtatccaccggaacgacggccatcaggacttttttcccattcacgccgttcacccggtcattccagatttttttatcatcggcattccagtacgcgtcaaagggaatatgggaatccttattttttacctgatgagtgataaatcctgtttggggaacatgtttgaaattattggaacaagacactaccgccatgcagccaagcagcacgagggccatcagggaagccgggaataaaaaacggtgtttcttcatatcaagtaacaggcagaatcgtttttatcatggcctggcaccagctgtcaataaaacctgcgggtgaaaatcccgggctggggctctcctgccgggcagaaagagccaaggcgggaattcctagtcttcttcatccatggggcggtatttcacggccagtttttccaggattttcagggccctggaggcgcggctgcggaaggatttgtagtcccgggggtcgcagtcgctccaggcgcgttcggacagggccagggcgcgcggccatgccatgtattccaccagccccatattgtacaggtattccgtccagatgttagcctggaggccgcacaccctggcggcttcctccggggagagttccggcaattcatagccgtacacctgcttgagcggaataaggcccccgacagctttcggctccgtggatgcggcagactggtaatagtcaaaatagaagtgggaacacggcgccagaatgacgggatgccctttcctggctgccgccgcggcaaagccgttgccgcgccacgccataacgaggatgtgtttgtccgcctccagttccccggcttcatcccagacgatggcgtcatagccgtctttccgcacgtagtccgcaatctgctgcaggaaatcccggcccagggccttgagatccttctccctcaggttctttaaacggttctgacaataccggcattttttccatgcctcggcagacacctcgtcatggcccaaatggatgggggagccgggcggaaaaacggccttgagttcatccaccacgtctttcacgaagcggagcgtttccgggcgccccatgcagacggcatcccagccttttttcccctccacgggaaaatccacgccgtcgcaaatcaaatccccgtaggcatgcatggccgcataggaatggccgggaaggtctatttccggaacaacggtaacctggcggctgcgcgcataggcaataatctccttcatctgctcctggatggcgagtttcacttcctgccagttccactctccgtcagcgagcggaacgcgccaggcgctcatggaggtaagcaatggatattttttaatttccaggcgccagccgggaccgtccgtcaggtgcaggtggaggcggttaagcttgaacagggacatggtgtcaaccatgcgcttgacttccgccatggtaaagaagtggcgggaaacatccagcatcaggccccgccattcaaagcggggatcatcccggagggaaaaaacgggtacggaaaacccctccccggtccggttggcgcttaaaatctggaccatgctctgccacgcgtagaaaaggccctggggcgccgccgctttcagatgcaggatgcccctcccttccccgccacgctccaggcgggcctcatatccttctcctgtccccgagggggttccctcaaccgaacagacggcatccgcagaggttttgtcacgggttatggagaggccggacaaaacgccctgggcattgagcacattcaggagggcttccactacaggaacatccttttccggcgcatagaccgccagccgcagcgggagatgcgccacggcggcccggtcagacctgcatgcggaaggcgcggggagcagcacctcctcggcaagcagcatttccgacatgccggcgcccggtaatccggacagggccagccatgctgccagacggaaacaacaccccttattcatcatccaggaagtacgacccaccctggtctcttctttcaatggaaggagctttccctcagtcccctgtgtcccggaaggcaaaggcgcggccatattcagccgcgcctgccggattccgtccttttttacattcacctgcgtccgccaaaaaggccgccaaggccgccccccaatccacccagacccttcaggccgcccaaacctccgcccatgccggaaagtccgggcatcttgccccccttccctttcatggaagccatctgcttcatcatggcgcccattttgcccttgccggacatcatcttgcgcatttcggaaaaattcttgatcagcttgttcacctccatcagaggacggccgcagcccgcagcaatacggcggcggcgggacggattcaacaggttgggattgctcctttcctttgccgtcatggagagtacaatggcttccatgtgcttcatccgcttggggtccagggcgccttccggaagctgttttttgattttgccgaagccggggagcaggcccagcagtccttccagcggtcccaggttctgcatcatcttcatctggtccagaaagtcgttgaaatcaaacttgccggacatcatgcggtccatggatttggcagcctgctcttcgtcaatgcgggcggcggcatgctccaccagcccgacaatgtcgcccatgcccagaatgcgatccgccatgcggccggggacgaaggggccgaactgatccagcttttccccctcaccggaaaatttgatgggcttgcccgttacggaacgcatggaaagagccgcgcccccgcgggcatcgccgtccagcttggtcaggacgatgcccgtcacgttcacggcacggtcaaaggtctgggccacattcacggcctgctgtcccgtggcggcatccgccaccaggagcgtttccctcggcgaaaggaaggcgtgcagctggcgcagctcgtctatcagggcttcatccacctcctgacggcccgccgtgtcaaaaatcatgacggttccgttctgggtccgggcccattccagagcctcgcgcgccacagccaccacgtccctgctgcctggtgcaggcttataaacgggcactcctatttgttccgccagcgtcgccagctggtccacggcggcggggcgcaccaggtcgcaggccaccagcagggggcggcgcccctcgttcttcaggcggagggccagcttcgcgctggtcgtggtcttgctggcgccgttcagccccaccaccatgattctggcagggtccgtcagatccagccccacggcgtccccgcccagcagggcggcgatttcatcacggaaaattttgacgatttgctctccgggcttgatggatttgagcacttcctgccccatcgcccgttccttcacgcggccgatgaattcccgggccacgccaaactccacgtccgcctccagcaaagccagccggatgtcgcgcagggcgtctgcaatatttttctcggaaattttgcccaggccgcgcagcctccggaacgtgttatccagtttatctgctaaaagtgaaaacataatcgtatgatgcgccagactgtgccacatttcccccttcccgtcaacaagcgcgccctgcatgggacatgatgcttgacttgccgggggcttcgccccatcttttcccgcatggcaccctttgacctgaaagaggaaatcttacgcctgaaagaagaacgcaacgccatcatcctggcgcacagctaccagaccggggatatccaggacatggccgactacgtgggcgattccctggggctggcctacaaggcgcagaatacggattgcgacgtgatcgccttctgcggcgtccatttcatggcggaaaccgccaaaattcttaatccggacaaaaccgtcatccttccggatgctgatgccggctgttccctggaagcctcctgcgatgccggggaactggaagccttcttaaaggaaaacgcccataagaattactatgtagtggcgtatgtgaactgctccatcggcgtcaaggctctggcggacgtaatcgtcacctccgggaatgccgtaaaaatcgtctcccaggctccggaggaccgccccatcctgttcgtcccggaccagaatctgggtgcatgggtaagccgccagcttggccgccccctggaactttggaacggagcctgccacgtgcacatggagttcacgcgggaccagattcttgccctgaaggaaaaacatcccggtgtgccggtagtggcccatccggaatgcacggaagccgtgcgcctgctggcggaccatatctgctccacggaaaaaatgatcccctattgcacggaaacccccgccaaatctttcatcattgtgacggaatccggcattctgcaccgtctccgcaagctggtgccgggaaaagaattcattcccgcgcccacggagcaatgctcctgcagcacctgcccgtacatgaaaatgaacacgctggaaaaactgtacctggcccttcgggacctttctcccgccgtggaactgccggaagacctgcgcagaaaggcggaagccccgctgctgcgcatgctggagcaatcccaatcctgacctctgccttccccgcatgatacgcctttcagaccacatcgcggccgctggcggctggctctccctggaagctttcatgcagctggccctgcaccacccgcaggaagggtactactcctcttccattgaaaacatcggtcaacgcggggatttttccaccacccccacgctttcccccatcctcgcaaaagccattgtcgcgcactggaaagaagcctgctcccgctgcggcaggcggctgcctctgctggaaataggcgctagctccggtgccctggccgttaaaatcctggagcagctgggattctggaaccgcctgaatacggattacgtgattgtggaatcttccccacgtctgcgcgaattccagcaccttctgctgggaggccgcgccaaaatttactccaccatggaaaaagcgctgaaacactgcggaggcaaggcctttattttctccaacgagctggtggatgccttcccggcgcgcgtatttgaatacacggaacaggactggaaagaagtggggcttgtcgtaaaaaacggagccgtccgggaagaactgcgccccgtccggcagcagccgcttttctcccatatgctggaatacggctcccagccggggcagcgggtggaaattcacgactcctacgcgcgctggtttacgagctggcttcccctctggaacatgggcgtcatgacggtcatcgactacggggatgaaatggagcggctgtactatcgccgcccccggggttccctgcgcgggtacaaaagccaccaggtgctgacgggggaggaactgtaccgtaaccccggcctcacggatttgacctgtgacgtcaattttacggacctgctggaactatcccgcaactgtctgggggaccgggtcactttcatgacccagcgggactacctgctcccgcatgcggaaaacacgccgcaggatgcctttctgacggatgaatacggtgccggaggacacttccacgtactcattcaggaacgccagcggctgcaaccggaaggcacccagtaattcaggagaccgtacttggaaatgccggacgaaacctaagcaagcccccgtccgacagcgacggccccatctttcttcgagaaagaaaaatattgattacaggaattagactgatgcccggaagggatggcactctatcagaatttttttctaacaaacagacaacattaatgtccataacagggaggtgttgagcgtaagaattataatattatcttttcgtgtaaaataatgactatcttttataaaaaagcaaaaacatacaaataaaattctatcgacaccgacttcggatcatactattgataaaacgatcaggaaagggcggccacccctcgcttcattcattaatctcagctttttaatacctgatgaatcccccctcatcgttcttcctccgcccatcgttctgccgttcccgcttaccggaaatggtactttggagtaagcggcagcctcggcaggcggggcatggaggcagctccggagcccgatccgctaccgtttgaagcgatccggatccatggggaaagaaccgtggggccgccgagcacgtcggcggacgggcacagcgcgcacgggacattcaccatcccggaaggggaggagggcaaaaagctctacggcacctgctcgctcttccttggggtggacgactggggaagcctggaagtaaaggactccggcggcaacgtggtggcgcaggtggatctgaaagaaaacccgcagacggcgggcgagcagggcgggcacaaataccatacggggaccggcggggcgcagctgccctccggcacctacagctgggaagtcagccagaccaacatcgactacaatccggcaagcggcaacacctccatctgcaactacagcatcgacgtggtgccgacggaaccggggggcaggaaagaacccgaaccgtgtccctgcgagggagacacgtgcgacaacagcggcggaacgccgccttccccgtcgctggcccggtcgggccctgaggcgggcatggaaagcggcgtcctgggaaactacagctcggcggggtgcagcgtgacggcggaaagcacggccacgctgatgtactggtcctgcaacttcggggcgttccgtggacttgggggccttccggccggaagggtggaactgagggctgaacaaaacgtctccggcctggaaagaccctcctcactggcctacaaccatcccctgaacagccgtctggacgtgccggaagggggcattgcgccgggagtgcggttcaacctggtgcagggagaccgggtgattgccatgcgctgctacacggacgggtccgtgctgcccatcggggtggacacgtcgggcggagggcgtgcggcgctggccacggcggaaggacaatcctgcctgcgctgggtggtggaagacggcagccaatacctcttctcggcggaaacgggaacgctcctctcctacaccaccacggacaggcaggtcatctccaacgcgtcatcctatctggacgtcaaatatgccgaaaacggctcgctgaggcaaatctggaacctgtgggacggcctgctcaacgtggaaaacgtcacctccacgggttacgtcatcgcgctctatacccctgggcaaatcaccggaacggacggacagggattttataccgttacgggcgctcccttgaaaacatttattctttccctggatgctgaggaaaagttcactatcacggaacagacgccagccaggcagccctacgccgtcacctggtggaacgacggcctggcgtggaacatgcggcagggcacgggggaagacgccctcacgaccctccgcacgcgcacggagctggaaccggaaaactcggtctggcagctggtcacggaaatctccaaaaacggaatcgtggcggcgcgcacctgcgccatctaccagaccacggacgtgggcgacctgctgctcacgctggcggaaggctacggaagcccggaggagcaaaccacgcaatacgcctacgaccagtgcggacggctcaggacggaaacggctccggacggcagccagatccactacacgtatgacctctacggccgcctgctcagccgggacgaaccgtgggcggaaagcgggcgtcgcatcacgcgctacacgtatgcgcattcgggggcggacaacttcaacgacgacccggcctcggaaacggtggatctgctcccgctggaaggacacgtcaaaacgctgacatccaccacctggaaatacacgacggccaaccacatcaaaagaacggaacggcgggtcacgggcctgggtgtggcgggcacgcgcctgacggcggaggaacaatggctggccggagccgccaacatccatgcctgcggacgcacgcggttcagccgggacctcgacggcgtgtaaacgtggcacgactacacggccacgacggagcacggcgccctctacacggaaacggtggaaacgcgcatcaacggagaagctgtgccgggacaaagcacgcgcgccgtcacctggatcacggcggaagggcagcgcgtcagggaagaaaactacttcctgctttccaccgggcaatgggcgctcacgggcagcgccgtctacgaatttgacacgcagaaccggtgggtgaagcggacggcgggcaacgggctactcacggagcgcgaactgatgtgcgacggaggcctgctgtgggaaatcaatgaaaacggcatcaggacggactacgcctacgacacggcgcgccaactggtggaaatcacgcgttccgccgtgatggacggggaaaccgtcatcacgccggaaaccatcaccacctacgcccgggatgcggcagggcgcgtgctctccacgcgtcaagacacgggggcgatgactacccaagaaagcacggagtacgacttgctggggaggatgacttcctctacggacgtcctgggccgggtcactacctacgcctacagccaggacggcctgacggcgacgcaaaccgtcccttccggggctacattcatcacgcgcagcgcgccggacggaacggtgatggaagaatccggcacggggcagcggcacatcatctacgccatcgacctggtcagcgacggtgtgaggaccttcacgaaagccgtctccggggaaacgcaaaccgagctgcagcgcagtattgtcaacggagccggggaaaccctgcgcacgggcgtccccaacaccgtcggcggagtcatttacacgaggaacacctacaacgccagggggcagctcaccaaaacgcagacggacgcgagcaatgcggccacgacgatggccccgaccctgtgggaatacgacgccttcggcaacaaaacgaaagaaacctggaaactcgccgatccggctacggtgtccaactcgcgcatcaccacgtggagctacggcgtggaacaggcccagaatgaagtataccgcgttgttacggcgaccaggaacaacagccggggaacgacctacgacgaaacgcagaaaacgctggcttcctccctctcgtccacgctggaaagcaaagtcatttccatcgaccccaggggaaacgcttccgaacaatggagcgaatacggcccgggagccgtccggacgcagaaaagcagcattcccacctccgacatcacggccgccgctacggtcatcgacggttttatcatctcgcaaacggaccatgcgggcgtcacggccacgcatacccgcgcctacacggaaaccggcgtcatctacgccagcacggacggccggggcaacacggtcacgacgcacaccgaccttgccgggcgcacgatctcggtgacggacgcggcgggcaacacgacttctaccgcctacggtccctggtttgaccagcctgccgtcgtcaccaacgccctgggcaacacgacctgctacggctacgacctccggggccgcaacacggcgcaatggggaacggggacccagcccctgctcttcggctatgatgaagcggacaggatgataagcctcaccacgttccgggaggacgcgggcgacatcaccgccgaccccacgggacgcacggacggagacgccaccacgtggagctacgatgacgccacgggcctgctcatccgcaaaacctgggcggacggcacccatgaagacaccgcctacaatgccctgaacttcaaatccacgctcacggacgcgcggggggtggtcaccacctggggctacaacctgaagaagggggtcaacaactccgtctcctacagcgactccacacccggcatccagtacgcctacaaccacctcaaccagctgaccctggtcacggacgcctccggctcgcgcgtcctcacgtacaccccctgcaacgaaccgcacaccgacagcatcaccatcggagggagctcttaccagctccaggaacactacgacacttacggacgctcctccggctataccctgaaacagggaaccgacatcctccaggaagtcagccagggctatgaagccgacgggcggctggccagcgccggaatcaggcacgggggaacggagcaaagcttcgcctacggctacctggcgggaagcagcctgttctccagccttgcgatgcccgacggcatcgtcagggaacttgcctacgaacagcggcgtaatctgatcaccgggatagactgccgcctgggggaaaccgtgctggtctcccgcagccagggctacgatgccctgggacgcccggtcacccgcacccagcagcgtggaacggaacccctccgcagcgacagcttcagctacaacggcagaaacgaactcaccgttgccaccctgggcgccgccccctacggttacagctacgacaacatcggcaaccgcaagacggcacgggaaccggccgaggaactcgcctacgcggccaacgagctcaaccagtacaccggcattgaagaaagcggggaaacgccttttgtgccgacgtacgacgcctcgggcaaccagaccttgatcaagacgtcaacgggcgtgtggaccgtggtctacaacgcagccaaccgcgcggtgagcttcaccagccacgaacggtacctgtaccgaggctatttacaaatagcggcattggatatgctggacaaccggaatgtgcttcggacactgctgtgggaccctctggaaccggtggccacccgccccctggcccttgcgcagggctcaaccgtgaccccattgctgaacagggcgggtggaatctttatgcgttcctcgggaacaaccctcaaaataagtttgatgctttggggttaaaaaaggggtttataaaaacaggggatccatgttcaaaatgttgcaaagaatgcaaaagatcacaggaacgtccgatcattcaggatgcaggaacaaaaggaattaatgttaaagcatcggttaaaagtcctaatttcacatctgaatgtgatcataataatacatgtaaagaaaattgttgctatgtagtttatacttggtttgattgttataacaaaacatgttatagtcaaacaggcgatactttcaacagaaaaatccgacctttgagaggagaaggcagatctcagagcgcattaggggtaagtgttcaggcttataaatggtgttcctgtaataggggaaaatggaaatgccacagcgtaataaagaaaagcaatataatattatataaagtcgataatcctcaaaacccgaaatcatgggttctcgcaacacctcccaaaaattaaaaaatgaataaaatattatatttagtgtttatgttattatacacaagttgctccaatattgagcagaaaaacattaatgtaagagaaaacaatgaatcaaatattaatacaaatttagctctcatttatacagaatggtttgtaaatcaagcatgttctttaagaaaccttgcaccaggaaaatatattttttctaaatttgatgtaactccaaatgatattataaaatttcaaaaactagaaattataaatttatacctcaagaaagacgatccacaaagaaaagaaaaaatagatacttggatagaagatcaaagagacgcagctaaagcgttaaatatgaaagatcagataaaatcagaaagatcagatattcattatttaataaatatacttgatgagcaagaaaaatatgtcaataaattgtacctacaaatgtcaactctagattgacttcatgagagcatgatctactcataaactatgattttttagacgccgggccgcactagggaacggagtctgttcacagcaacaactttagctacaacggcagaaacgaactcaccgctaccaccctgggcgacgccccctacggttacagttacgacaaacatcggcaaccgcaagacggcacgggaactggccgaagaactctcctatgtgaccaacgaattcaaccagcacaccgccatcgaagaagaaaacggacccctcctttgcgcctcaatacaactcctcgggcaaccagacactcatcactgcctcaagggcatcttagaccatggcctgtcttgaactaaaaatgtagatttatgtcttctatactgtgggttctcatttcgtcctttttgatgtgtttgttaacatcaaagacaaagcaagaagaaaagttctataaaaggagacaaattcagaatatagttagaaaatacaaaatcagtgctgaaattataggatctttatttctcattgttttatgtgcactcattctgttagctctgtaccagtctggcggatgcgttgtgatcgctatattcctgagttctgtgtacacattattattgatgtcctgtgtggctatagttgtatacgttctttgtaagataaatgagcattggaatccagatgaactttatcttgtaattgctatccgaggaaatatgtctttcagacgattaaaacaagtacaattttttcttttaggaatggctttttcaggttttatgtattcgcttatttatttaatattagatatgtaatttatattaaaaaaaacatacgtcatatgcaatttgtacatttttaaatctatgctactggatagctattctatggaaaaatataggtactcttaaaaacagggtttgcatgaactgccatagccatatattaatttgttccgattctttctcttctaattggattctgaaataataatattatatttttcactttaatgtttattctgcattttgaatacggctactcgaatatggagaataagaaaaaaatgacagagtatatagaaaacaaagggctataaatgtaaaggaaagatatttagatgatcagtaaacttaatcagtatacaccagtattacccattctgctctcaactcagacgttaattaagcctttcagggtggctggacgatctgtataatacggccaaccgcgcggtgagcttcaccagccggaatggaaacacgattattgagtgcggctacgactatcagggacgaaggtacatgaagaaagtgacccaaaacggaacggtcaccagccacgaacggtacctgtaccggggttatttgcagatagccgccctggacatgctggacaaccgtaacgtgctccggacactgttgtgggatcctctggaaccggtggccacccgccccctggccctcgcgcaggacgcttccctgtactgctacggcgtggacttcaacaagaatgtgtcggaggtgttcgatagagagggagctgttgcggcaacttacgattactccccctatggggccgtgaccggtacgggcagcctcgtccagcccgtccacctgtgggatctcaaaagcagcaatgtcgcagaactcatgcacacaacggctggaatcctcattatcatattttacagttaatcagtctcctatagtagctggttgccggtgtttcgataagcggactacaattccgaacaatcccaattatcctgaatatacaggtcagcctaccggaggaggaattgaagtcatcaaataacaaaaattatggcaaattatttttcaggagaagaaatcaaagttggagatttcattacaacagataacggatatgataaaaataaagtaatgaaattaatagataacacatatttaatgaaatcttatggtttagattgttttggcgcattattatctagcagcagcgctaaaggaatgatctttgtatcgtttaaagaactttcatctcaagatacaaaatttataagaaggaaaacaatttaaataaaattatgaaaacatgaataatcattttaacaggtctttcttttctatcaggaagcaatttgtcatttgcagaaaaggagcaaaagaatacacggcaagaattttcttttggagatgatcattgtgtgactagatttaatttttttgcaaactattcaactgattaatacagaaaaatatacacattcagtattcaacttctcaatactggatatggttaaatggaatatttgatagcagaaagtataataaccgaaaatataaattctccttctttcccgcataagtatgaactcatcataaataattgggaaaatgtaaaaaacagtgtgaggaaataaaaaataatgattattataaatcttctgcttttaaaaattgtcatgaatgacacgattgcaatatgaatggattttttaagatataggaaaaatagttttagtcaaaaaatataatatattctacggatttttattttctaattgatgcaatagcaagtctttcttattctgtattaagagctatgatgccctgggacacgcgaccatacgcacgcagtggcggggaacggaatccgtccacagcgacagtttcagttacaaggcagaaacaaactcaccggagttaccctgaacaccacccctacagtacagctacgataacatcggcaaccgcaagacaaacgcaggagacagagaaaaaatttataaatgcctattcaattttatatatcttcacgaaattgttatgaattaagatttattgcaacaatatatttcattcaccgtacgacgaaactttcgaaatctaaaaaatcatattatgtcaaaatatataataattcctattattttcacatcaacaatagtttatggagataatcaaaaatttaatgaatatgcaattttttgcgaaaaaatgattgtcacattgcagagctgcacggatgaaaaatccactttttcacactcttccgaatttcctattattttatatattgttttaaatgaaaatcctttgaaagatttttttaaatctcaaaagggagctttatatcatattatgctattggcggagatagaaagattgaaccatcacaaatggttcaatctttcctctatgaaaaatcatgttaatcaaataaaatcaaaaaataccttatgcaacggcatagaggatccaagttctgctgtttccgccaaggaaaaaattattaattacgtaaataatttaaatgataataaatcagatgtactctatttaatttcatatttattggatatatacaaaattaatgatttggaattgtttatgaaaatcatgtcgatatcagattgcgaattgctcaaaaaaatagatatgatagaaaaaaagattggttctttacaaattaatcatctggaacggacgacaatcaaacatttgataaaagaaattcaaaacaaatataaaacacataaaaatatttataatgaattaagaaaaaaattaaacagtaacgtagattgatttgtatcaagaagaatttgtatatgataaaattgcttctccgcgagaaaccgtgcttgtctcccgcagcctgagctatgatggcctggatgccgccccctcctacggttacagctgcgacaacatcggtaaccgcaagacggcacaggaactggcctaagaactctcctatgcggccaaccgcgcggcgagcttcaccagccgagacggagcgaccatcttggaatgcggctacgaccgccaggaacgaaggtacatgaagaaaatcaccgtcaacgggacagtcgccagccatggacgaaactgtaccaggactatttacagatagccgcctcttgactgccggatgccgaacaaataaaatgaataaagagaaccctatatttgttttcccggtttatcataacaaataccatgcttgattttctcgttttcctgctggatatcccgtcccttcttgctgatttttctcctcgcgccaagcataagggagaatcaccgtactggcgtttcatggggctttttttactgactgcagaactggttattctatttttatgggatattacggaaagcccgccagctcttgtagcctgtattactttgggcctctggctgatcgcgcacctctccatccgcgccttcaggaacgggaaaaacgtaaacggcctctccgtccgttccgctccgccattttcctcacaggcgccacaaagaaatgaagcccctaccccgtatctccctgaaagggaatagctatataatttatttattatcaatcattttaaaatatatacccggatttttgtcatacaaatttcttctttttgaacggatgctcctgtccgggactctaacctgcatcagcaacaaaccgggcggcgggaggtagagagaccgccgcccattatggggagttctgagtttcataggtaatatagttggataaaaaacccgcacgggggaaaccctgtgcgggtttattcatcccccctcccggaatgccagaaaacagggccggaacaggccgcagaaaatcatggctgaaccaaattaaggcttgagagttgaaggcatctcgctaatctggcttcagcaagaatcatctgttatcatggtcaccacgaacgaaccgaatatttacgaaacgggagtactggactccaatgcggaaggcaattttgtctataccaccctggacgccgccatcaactggattcgtaaaaattccctttggcccatgccgatgggtctttcctgctgcgccattgagttcatggccgtggcctgttcccggtatgacctttcccgcttcggctcggaagtgacacgtttttccccccgccaggcggacgtgatgattgtagccggcaccgtcacttataaaatggccctggccgtccgccgcatctgggaccagatgccggaacccaagtggtgcatcgccatgggcgcgtgcgcttccaccggcggcatgttccgctcctattccgtactccaaggcgtggacaagattcttcccgtggacgtttacatttccggttgcccgccccgtccggaggctattctggaagccctgctcaccctgcgcaagaagctggatacccagcagcccgcacgcactttcttcaagaaggaagaacctcgcgaagccaacgctcccgtcccggtcaacacggaaatgccccttgaataagttttttcaaacgtttcttccgttcacttttaccattttttctccatgctttctctagaatcacagattaaaaccgccgcagacaacgcccaaaaccgctttgggaaagacatcatcacggaccgctacgaattccgcggagatattacgctgaccgtcgtgcgccaagccgtggcggatgttgtccgctggctgcgggattccgccgggtttgatatgctggttaacctttcttccgtggacaatatgggggaaagcccccgctttgaagtcaactacacgctgacacagtcggaaacgggagcgaacctgagcctcaagacgaaggtggacgatggcgaagaagtgcccagcgtcacggaaattttccagtccgccaactggcacgaacgtgaagcatgggacctgatgggcatcaagttctcaggccatcctgatttgcgccgcattttgatgtgggaaggttatccttatttccctctgcgaaaggatttccctgttcaaggcgtacctactgaactgccgggcgtcgcctttacggaggcggctcccacccagggagcaccgttcgctacggaacaaggccgctgccccagcgcctgccgcgaaccccggtcccataaattctagcccattttccagccccgcaatgcggggtcccacccatgacccgactcatcctgcccatatgcatcatcagcctgctcagcggctgccaggacgccaacccggcagagcgggaatggaaggagcagttatataaaaacctggcaatcgtgggggccaggaactggattgtcatcgcggaatcctcctttcccgcctacacgggaaccggcatcagaaccatggtttccgacaagacgtcggacgaagtactcctggatgtgctgaatatgctggaagaggaagcccacgtggtgccccgcatcatgatcagctcggagctgcgcagcgttacggaggactatgctcccggcattaagcgctaccgcaacaatatcaataaaatgcttcctgggcgccagcattttgaactgatgagccgtacgatcaattccctgatcgaagacgcggccaggcaattcaacgttttggtcattaaaaccaagacatccctgccttactccaatatttatattgaactggattccgggtactggaattcggaatcggaaacggtactccgcaagtctctggaagccaaggacgccgccaaccgccgcgcggcccaggacagagtgctggacgtgcccctggttccgggagccacgcctgcgccacagggcaacaaggaaaatccgccaatgccgggagctcccgcctcccccgcggacaacctgccggagctcccgcgggaaaaccgccaaccggcttccccctccggagacaaggcccccggcgtgcctccgcctcccatcagggatcctctgggaaggaaaaccgccattgccagattttcatgaaccatcatatggacaaggctacagaagaacgcctccgcgcagaggcatgggtaggggacgccattttggcgttgtacgtcagggaatggattctggcggaggaaggagcgatcaacggcaagcttttcgtagaattcaccagcaatgattttctgcgccgcaccggcaacgccacaggcgtggaagcggagataggccgcactttcaaagcgggcggcctggaagcagcctatgcatggattgagcatcatttgaagccccgcatgaaggaacgctggcacaccctgcgcagaaaagccctccggtaaactgccgccgccatgcccgccaccggaacacccctgccttgggaccgcggcaacggcccctgcgtgatggccccgccccatttgaggggctgggcggaagaggccgccgcctttctttccctccggggcatggacggaatcacagccttcgccacctccggctcttccggttctccgcccaaagccattttgtttacccgccgcgccctggacatatgcgcgcgtggggcattggaacatttacatgcggaaagcggggactggtgctgcccgctgcctgtatggcatgtggggggcgccatgatttacctgcgcgcggccctggccggaaccgccgtccatacgctccgcggaaagtggtgcccgcaggcttatgccgacctgatgaaaagttccggagccagatggtcctccctggtccccacgcaggtagtggatctggtcagcctcggcctccgcgcgccttccaccgccgggtgcattatcgtaggcggcggcgcgctggacacggagacgggacggaaagcacgcacccttggctggcccgtagtgcagagctacggcatgacggaagccggctcccaattagccacggcccttcccggagattccttccatacggaccgcctttcccttctgccccattgggaagctcagacggacaaaggcggcctcctgcgcttccaggggaaaggcaaattattcggccgcctgctgacgcaggctcatggagggttccttctggaaagagtcgctccgcaggagtggtggagcacccgcgacctggtgcgcctggaagggcgtttgctgacctttctgcgccgggcggacagacttgtcaaagtcctgggggaactggtggatccggatgccgttcaggacgttttgcgccgcagcgttccggaggctgtcgtggaggcagttccacatccgcgcgccggaatggaactggtcgcctgcggcccttccgctgcccctctggagcaggcctgccgcgagtggaatgcgtcggccccaggcccccagcgcatccgcgccgtcatggaaacgcccatccccctcacggtcatgggaaagctggacagaaaccggctgcgctcccagttgagcgatcatccggaaaagttgaagggaatttactaaaaggtaatcttccgaggatattcatcaaaagaatccggacctgatggaatgaagaaatacggcggggttggaatccccaatccctcgcccacttcattcatcccgtctcccaggaagccattttcctccgccttgcgggcttccgcacgcgtcttcggaaccacccggtcccactccatttttttctttaaaaaaagaacgtgacatgactaataattaaacattcagacacgtgaaaaacgcttgtagggcagaggtttttcctgctagaaaagagttgacccatgcgagcccgtcttttgcttattccctttattttttccgttccggcttatggccaggacatttcttccgacgcagcggcaaatccccccgggcaggtgaaatacgctccggtccgggacctctcccaactgcctatggacggcggctggacgtacggggaagtgctggacaaagccgcggctggagacttccgggccaatatgctggccggggaatactggatggggctttattacctgaaccgtggagacctgccgctggcctgcctggaacatatgcagcattttttccgtgatgcggccacggcatccggccatccggcacccaagctcatgatgacggatccttacgggattttcgggattttcaaggcgcaacccatgcaaccggaacatgcggaatggctggctgcctgccgcaagcttgcggaaaagggagacatggatgccgttacggccctgtacaccgttacggatcttccggaagccgagttgagacgctacctggcccccctggaaaagaaggccgcttccggcgaccaagatgcgctgtcccagctcgctttcatcaaagtggattggctgaaggaaaatcccgccaacgttatcgagaccctgaagcaataccggaaaaacgccaaaccggttcttctggcgcggataggggaactggcccttgccctggatggcaaggacggcaggggatggagggatacggccattcaatccctttcccgggctgcggaaaaggggcacgcgggggccatgcggcttctggcggaattgacgaagggggccgcaccggcacaggccggaaagcttttggcggaactgcgctccagaggggatctggaaactctgctggcggacctctccagcggcatgaaggaaaaaacaggggtagggaaaagctccctcctccagcctttgttcgagcaggccaggaaactgggcagcaataacgcctgtgcctggtacgcccagttaatttccgaagcgcagcccccgcaggaacaggaattgcgcaaggcggcccttgatctgctgtcccttcatgacgaacggggcatgccatacctgaaggaacctctgtccttcccccagaaaaaactcaaccagcttcccccctacgccaagacgcataaggagcttgagctggcctctcagcttggggacacagattccagcgtacagttgggcgagctgtggaaggaggaattggccaatacactggattccgtagggaaggcccatgaagcgcgggaaaatatgcgcgtatggtacaggcaggcggcggaggaaggccaccccctggccaggctgcgcctggcccaaatggaaaacccggacttaatggacaaaccgtccgcagaacctgccagaacgctgctgaacgattgcctggcaaaagccgccgcaggagatttcatcacgctgaaaggcatttccgaatacgtcacgccggaacaatgggaacagctgaccgccaccctccgtaaaaaagctcagggggggaacgcccgcagccaggcggatctggcatacctgatgttattcagttacaggagcgaagaatccggctacccggaagccctggcctgggcccggctttccgccggacagggagatccctgcggcatgtacgtgctcggccgcgccctcatttatgaattcggcctggaaaaacgcatggccgagggggattcctggatgttccggggagccttgaaaggccatgtggatgcggcggacatgtggagttccaacaatgagaacctgcagccttacagcgccatgatgcacggtctggcggcacggggacatatcccctccctgcttttcctggccaaccaggcggcctatccccagaatacgggggaaacagcggccctggacaacggattcacttccgcctgccagcaggtcaagctgaccctgaacggagaggacgccaacactccgccgtggctccggaaaccggaacagaagggtaagggggaagatattccggcggatgccggaaccgttcctccctggatgaccccgtccggcagggaacgccaggccccggccccgaaaaccatcaatccggaagccgtgaagttctgggaacaggctgtggaactcggcagcctgacggcactggacgagctggccaattattatgaaaccgtggcagggaatgtgcaggagcctgcggaacggcagcagcttctggcctctgccatgacggcagccaccgccctagtgaaaaaggaggacgtacgcggtttcaagaggctggcccgctattacgagcagggcatcggcgtgcagccgaacagggaactgtacaaggattatgtactgaaagccgcggaaaccagggatccggaagctctggtggagaaggctcgcctgctcatcaagggagaggatctggagccggacccgaaaatggcgctgaatattctgaccgatctggaagagaaccagacgcatgcggtgcccggcatgcatttcctgctcggctacttgcatgaagaaggcctcggcaccccgcaggatatggccctggcctatcagttttacatcaagggggcggaacaggacgacgccaagtgcatgaacaacctgggttccatgtatgaacgcggaactggcgtagccaagaacctggccgaagcccaaaagtggtatgaacgggcggcggagctggggaatgaagacgctcttgccaatgtggaacgggtaagggaaaaactcaacacgaagaagaaataggctcctttcccgttccggaaatgccacggaatggcggtggaacacaaattttagcgcaggtttctgcagacggcagaaaataatgcgtgcgaagcggacgcgattttttaaagcgcccctgcctgtttcaaaggaagcaatgcttttgtaattcgagtatcttgtacaaacagccgcccgtccggttgcggtacgggcacgcggcgctccccagccgggcatgccccgccggaccgtatagatttctcaaaaaacggaagcaggaacggaatttttttcagaaaggacgtacctaagttattcccgagtcactttcaaccgcaaaaaccggcgttccattccgctttcccgtacgggttccgcatcccgaaattcggcagccgtctttccggcgttttccacttctcccaaggaaatccagtcgaccaggtccgtggaggcttccacttcatacttcacatccgttgcctgcggatttacaggccagcgcaacaccagatgcatgcatccgtcctccccctcttccagcgttactttcgtaacgctcccgcagggtttcaacggatcctgtcctgtggcgtatttcatcaggttggggataccgtccccggcaggaacggcatccgcagccgtccgatccgcggcagcatccggagggaaggagtcctgcacccacttgtcgtagcccgtcaattcggcgccatcctgcgttatgatgacagagcattcctgtttgtcggaagaacggaagattaccgttccgaaccgtccgtcagcggatttgttttccgccgccgtcaaaatgactgtagtccggccgattcccgaaacggcggaggcggaaatccagtccggacaatctgcgaccacccagcccagagccttctcttccgactgcacttccaccgccacggcaccgcccccggccgggacggtttctcccgcagaagaaagggcaaagggggccggagtatccggataagcggtggaggaaacataacggttggcggcccgaagcaggcagcattcgtcaaagtagttattcttcccggcggaatccgccacatccattcccaaatcccagtacatgaacccagccacctgctgttcactgatatagcgggcctttttcctgaccgtatccacaccgttaaagtgcagcgtcttaaccttgcctccgccataattgaagctggcggaatccagagaaggctcctcccgcactccggcgcaggctgagacaatgtcccggtaagcccggatatcagcgccctgccccgcgcccggagtcccctggaacggagcgctgagcatgatcttggagtccggataaccccatgaacggtacgttccgcacgcggaaaccatgctgttatatccgtttacatcaatctgggggccataattctggaacgtgaaataatccacataacgcatgcaggacgccgggaatttgtaatagtaggtatgcaaggaaatggtaaaaaacatatccggggaagcctccctgatagccctggccaattctccgtaattattccaggcggccgtatcgttctggtcaatccattcgaagtccagatccagtccgtccaattgatgcttgcgtaccacttccgccacattttcggcaaaagccttacgggcatttgcatcagacaacatggcggaccagttcccgccggagacacccagacgtatccgcattccggaaacgccttcagtcagcctgcggaggatacggacatgttccacccaggaagctgtatcatggcccaattggtcacttgtcccccagcggcccaccaacagcctgtctccccagctgtgctggacagccgaccccaggcgggccgccgcacgggcctcatgccacacgcgcatttcatcaattctgccatccaaattccttcctatgacggcattggcagttccctccatttcccccgcatccgcagcggccgtgcttacggcctccccgtccacataaaaggacgccgtatccgcagaagaattcctgacgaaggccagccagaaatacctgccggcttccacaggcggcaaatccgcctcccaggctttatccgggcctgcctgggtacggaccctgtaatggtcttccttccattccagcctcatggaaacgttatcattttcaaacagcaccgcctcctgtccgtctccgtccaaagccatacggacttccacggtaaacgctccggaactgccgccgcccagcaaacctccgcccacgttcatgtaagccccttccccggagaagtccaggacattggaacattccccgtcagacggcagcagaaccacaccggagctttccgtcacgtcattgtccggatattgaaaattgagagaaccatccgcggtcggcgtaacggaattgatgtagattaaatcggaattattgatgagatgggcgcgctccggccagtcataaataacatgcacattcctcacatacgccgtcaccagcatgtaacggaacgtttcattatccgtgacaatggaaaattcagtcccttcaggggcaaccgcctggtaagggcgcacaaaggcgctccctgtcttttccgcaaattccgtccacttggcatcacggaaatccccatccagacgccagcagcccaccagcctcccatacctgggatgggacaggggcaacggtccgttcaagaaaaagtcgtcttcctccccgcccagagccgcattccagaaacgcagttcatccagagcacccttgaaccccgcctccagcacaatccctttccagcctgatttcatggcctgcaggtaaggcgaccgcggcgaggaaacggccaggcctccgtccacatacagactgataacctcctccccgacggagacggctacatggtgccattcccccgcagccaattccttcccggcagctttcacggaagcgacggaatccccatccggagcagacagagccagacaaccgtgttccagggaaacagacgcatttcccaaagaaatgatttttcccgtgacggcatcatcattgggcctgacccagaattcacaggttaactggccttcagccgcccatgtggaagaaggaacggggagcgcaagagaagaaggaagaaaaatgagcgccttattgtgcaagacgctgacaggccggggctccggaacttccggagccggggaatcgtccgtactgacggtaacggcattcagttccatgcggccggaagcgctgctgtccgcctccttggtcacatcaaacaccagcctgccctgttcatccgcacaggccctccactccacagccagataagcgtcctgttccgatgaattggaaagaccggaaaattgattcccggaaaggctccccatggaactttgaagcccccgcacatccaccagagttccgctgaccagcgtcatggattcataagcaggcgcattgtgcccgcaaaagaaagataccgtatattccttgcccgcctggaatccggagaaggaaagcctggccgcggcggaggcggacggcatcccgttggcgctcagacgcatgctggtattgaaagcttcgcagccattggggaattcaaaagaagaaggcgcgtcagcgttcgtaccgttgtgcctgtgcttccccccttcataccaggtataccgggtattgggttccgccagcgtataagaacctccagaactgcatctagcggagacggtcagggaaaccagccttccgaacaggcttcccactgccacggacgaagaagaagaagccgcaccattcctgattaacggaacggcaacaaatgtattggcgcctcccgatgccgttgctggcatggttacattggtccatccctcctgcgccgctccggaaccattacccaggtctatgccgaagccggatgtctccgccgcctgcaggacacagacgcctcccgcaaaaaacgctgtcagcaaatgggctgcccttttgaaaaacaccttaaccataaataccgtccgccattttatccgtccctgtccatcaaaccagaaaaaactgcgtgggaaacggataaaaaagaggggatgaaccatcccctcttcgcacaaaaccggcttggacacagcctgtccggtcaatcacctgtatgaccgtcatcagtttctgcggcggcgcagaagaagggcgcccaggccaaaaagtcccagagaggccgtagccggttccggaacaacttcccccaaaaggcgtatattggtaatatcagcggccattccagcgccagctcccaatgttgacgtttccatagagttgaatatcaatccataagacgcatattcatccgttccgctcaaatccaagctaatggaaaaggaagagggagtgttcgtcagggtcgtcttggcgttttccaatgtccacgttcctatgaccgtagattctccatcatccgagaaaccataaacattgcaaatatatttgcattcaaaattcccaagggaaccaccccaagaagaagttttggcaatatcaaactgcagggaggcggaagccgccccagacggcatgtcaaatttgagtccggcaaaatttcctccggcattattggaggccacagctccgatttgcaacctgaggactccttcgtcaaaccctacctgaccatttaaactactgctttcccaagtcccgtgccattccccgacattataaccgaagacgttttgaggagtgatcccggaagaagaaacacctgtagtcccagaacccgtcggggacaggtcaatggaaaacgaagaagcatgaaccataggaaccaacgccaaaaccgccaagagacacaatgtttttctcataacaatccgttccatatcggatttagaatccgcattgcgaatgcaaaggatgaaacattttcggtacaaaaaataatccggtcattggcatttcagttcatcatgtatgtaatgcgttaataattaatctaaaaattattttcattgagagaggctttgtttttcctcctttttgtgtttccataatggacggaggggacaattcgttttctttcccgttcgggactggagggaaaaacatggtaacagattcatttatctacattttttgattcttttatgttgacaccggattctaaatccgcctaaaaaaaggatagaattttatatacaaaaaggcgcaggcattttggacgtctgcgccttttcctctccctcaaggaggaaaaccgcatcaataattcaggatgccttccgcgaccttgcgttcgaagtcagcaacatccaccacctgcccgctcagccgggcgtgttccgtggcaaaggccatcacatgggaatgggcggattcctcaatggaagtggtcatatcctccggagagggcaccgtcagcatgtcatcatacagagcctcaatcaatccccagtcgccgccgccgtgcccctggtagcctccggccagttcctccagctccaccacgcgggtttttccgccaaagtggggcgtcacggttatttcaccggggccgttttccttgtagaagactccggctcggattttgcctttggtgccatacacttcaatgtggcgcccctgttcgaaagccgtcatcgtgaacgtgcccgtcaagcctccctcaaagcgcatgatagaaacctgatggtccggctggtcgttgtcgcactggaggtagtccctgccccacggggaggttttcagccattcgcagatttcctccgcggtagcttcctgcgcccggtcatataccatgcccagccagcgtttgcattcgtcgtccgtggcgtatttgcgggcgtcccaggggtcttcccccaccggggtggtccagtccgtgcagcgttccggccggggtgaggagagcgtctttttcgtaaagaaggtaagctccccgaagctggcgacggaaaggcatttacgccggcccatgagccagtagaggatatccatgtcatggcagcatttggcaacgatcatgggagtggaggttttgctgttgccccagtgtccgcgcacgaaggagtgggcaaagtgccacgcccccacgccttcattggcattgaaggtgatgacttccccgatttccccgctgtcgatgatttttttcagggtccggtaaaactgggtgtagcgcagcacgtggcacacggccacgcggcgcttcagcaggcgcgccgtatccctcagctccagcgcttctttcagcgtcttggcgatgggcttttccagcaggacatgatagcccagctccatggccttcctgcacggagcgtaatggtagtcgtcctgcgtgccgatgatggccacgtccgccaggcgcggttccgccagcagggaagcggcatccttgaacaggcggacggaatcccgttcctcctccggggcaaagtcacgaacggcttccgtgcgctgtttgacgggatccgccgcggcggcaatgcggtagcggtttttttgttccatggccagcttcatgtaggtgcgcgtacgggaaccgcacccgatgccggcgagggagagtctcttttgttcaggcataaggattgtgcagataatatgggtagagaggttaaagaacgccggatttgacaagcagcgcttccgcgtccggatcacggcccatgaagtcgcggtagagttcagcggcaggcttgctgttgcccttgctgaggatgcagcggcggaagtcgcgcccggttcggggattcagcactccttctttcaggaagcggctgaaagcgtccgcttccagcacctccgcccatttgtaggagtaataaccggaagcataacccgtgggatccgcgaagatgtgggtcaggcggcgcgccacggaagggccgcggtccgtcatcggcacccggtaatccgccagaatgcgttcatccgtttcttccagcggaacacccttgtactgaggccagtttacgtgaagctccagatccagcttgccaaagcagagctggcgcatgaaatccgtgccgctcatataattgcgggcggcgcgcattttggagaacagttcgtccggtattttttcacccgtttcatagtgggcggcgaagaggtccacggattcacgctcccaacaccagttttcattaatctgggagggcagttccacaaagtcccaggcaacgttggtgcccgacagggacttcacttccacatcggaaaggagctggtgcagcaggtggccgaattcatggaagatggtttccacctcccggtgggacagcagcgcgggcttgtcccccacgggcttggtcatgttgccgaccatgagacccagatggggaacgcggggttttccgccgtgcggaggttcccctacgctcagatagttcatccacgctccggcgcgcttggagtccctcgggtgccagtccgcataaaaggaacccaggtgttccccgctttccgcatcatgcaattcatagaacaggacgtccggatgccacacctccaccgcgccttccggcgcttccccggattcaccgggcttgaacgccaccgtgggacgcggcgtgaccgtgatgccgtacaggccggagtagatggaaaagagcccttccatgactttttccacggagtaatacgggcgcaggtcttcctcgtcaaaagcgtacaattcgcggcggcgtttttcagaccagtatccggtttcccacggggagagcttttccacgggttttcctgttttttcctccttgtatctgcgaacggcttccatgtccttcaggaaagagggcttcaccctgtcatgcaggtcgttgatgaatttcagggcgttggctccgctcccggccatgcggcgggaagtggcgtaatccgcaaagcagccgtaccccagcaaatgggctttcctgtccctcagttccaggatttcagcgataagggcttcattatcgtattccccgcccttcccgatggaacaggagccctcccacatgcggcggcgcaggctgtccgagtccgcaaactgcatgacaggctggagggaggtaaatttctgggtgaagcgccagcggggggcttcttccgtgccgtggccgttggccagggcatccaggcgggcggcttccttcgcggaatccggcagcccggaaagttccgcttcatcttccacaatgagttcccaggcgttggtggagtccagcacgttttccgcgaatttcttggtcttcagggagagctgggcttctatttccgcatattccggcttcacgtcgtccggcaggtccgccccgctctcacggaagtctgccagcgtttcctggatgaaacgctgcctgacgggggaaaggcttttcacccagtcacaggaggccgcggctttcagcaccgtccacaggcgcgggttcaacggcacggaggaggagaaagccaccacttccggcagcatttccccgatggcctccctctgggcgggttcgtcattgacggagtccaggtgcatgatgcggccccagcccaggtgcagatcctcggaggccttttccagagcgccgaaggtgctttcataagtcagggactccagcggctggtcgcaaatggtccggatattctctttggcgcgggagatggcttccgtgatgtccggcctgatggcctccggcgtaagccgggaccaggaaaccagaaaggaggggtccagatagggatggttcatattgcttgatgtatgatgttattgaaaatgacaacggacgcgttccggtatttgccgcaacagccatgaaaaaataaaacttaccatatttaaggaacatccggcggaacagccgcaacctgctgagcatcttgatgaatgctgcggcggagaaggaacccgcaaccttccgggcacggcttcacgccccttttttatcaccgcaggcttatttttcaagatgaacaagcttcctgtcccgggattggacgtcatgttccatcgtgatgaggggaaatgccatctccaatccatccatgaggaaaccgggcatcaaaaccgcccccccacgtttattcctaattattttccggaagaacgggccttgtccagggtctccagcactccggcatggttcgggaagcgtttcagcgcctgttcgcacatatccgcgcattcccggaattttccggccttcaggtaggcgcgggccagcacccattccgcagggtatggcactacgggaggcaggagcagggaagaaaaacgctggctccgtatggcctcggacatccagacattggcggaatccgggaacatgagggagcggatttcagaagaatacaggctgcccgtctggagacagcgcgcccagtaggagacgctcatctgcctccgggcagcgtccgcgccgtccatcagcagccgcagaatgccggacatcttgtcaaaggcggatgccacggcgtccgttctgccctgccttgcggcgtaacatgcgcccatgtattgggagaccactgcggtcatgccgttgctcaaatccggaaaccctttggggagagggcccggaaaagccttgagcacaagggcctgccggggaaggccgggtcgggccagcatcaggcgcgcaggcagcgtcctggcctcccacagttgaaggagggttccgggagccagcggatgctttttgtccaggggaacggaagcggctctggaggcgatggcttccgcccttttgtaacggctagcgcagaatctggaaacggcacggtaaaggatggaacggaagtaggcgtcatcaagcgcgggagacacgttttccgccttctcccaggccaggcacagattttcagactccttgaacgcagcggatgccccttcataatctcccgtgcggaacaggcaatggcccagtaaatgaagggcggatgcggaaaaggggttggcggacacggccctgcgggcggtttccaccgttgccggagaaatggatggcgccacctcttccagcagggcgcgcatgaacagggcggcctggaagccggggcgttccttcaggacgtcttccaccacgcggacggcctccttctgcccttctccggggttgccctgcccgtcaaagccgtcccggaggagcatggcgtaaaagaggggggcgtatgggtcgcgcttccaagtggaacagatggttttccacgcttcccgcgccttcacggggccatccatcagcagcacggccagggcatccgcataagcgcgttcccgttccgggcagtccgggcgcagcgccagctctttcatgcgcttcatggaatggacgcgctggtcctggaaggcgggccccgcgcccagcaggctcatgcacctgccccagtgggccatgaggcagtccgggtccagacggagagcggcgtcaaatttaaggaaagccctcatgtccccgaacgtgagcagatgcgtcattccctccagcaccagcatttgcgcggcgggagatgaggaacccaccatcatcggctccacgccaggcggcaacacggcaggctgcgccggaacgccggcgcggaagacggcttcccgccagccgttcagggacgggctgttcatccaatacccgtgtgccccgtccgcggcggcggaagaacaccccgccacggcggcggccagcaggacatggaggaaagaggcgtccatacgggagaaacggttacatcctgtccggaagctggatgcccagcaggcccagcccgtgcttcagcgtgcgtgcggtcagctcgcacagggccaggcgggagtgccgcaccggcccctccgacttcaggaccgggcacgcctcatagaaggaatggaaagccctggccaggtcaaacaggtaggcggccagcacgttcggacggcagtcgtccagcacctgcggcaccacttccccgtagcgggccagaagccgggccagatggatttccgcatcttctgaaagctgaatgggggtggaccagtccaaaggcccgccgtccagcttgcggaagatggagcggacgcgcacgtaggagttctggaggtacggcgccgtatctccctgaagagccagcatcttgtcccagttgaaaacgtaatccgtcatgcggttctgggacagctccgcaaacttcacggcgcctatgcccacaacttccgccacgcgcttcttttcctcatccggcatgtccgggctcttctcctccaccacgcgggccgcgcgttcaatggcttcatccagcacatcctggagggaaaccgtatccccggaacgcgtcttaaacggcttgcggtcgtcacccagaatggagccgaacgcaatgtgccggtagtccccgtccatgccgcggcggcgctgcgtggagaaaatctgcctgaaatgcagggcctgaggggcgcccaccacgtaccagatggaatccgcgccccacgtcctgatgcggtggtccagcgtcgcgaggtccgtggtggcgtacaggaagcctccgtccgctttcctgatgatgcaggggttggcgcgccattcccccttgtcctgcacgaggaaagggtcttcattaggcggcacggaaccgtcggaaaacacgcagatggccccgtcgctctcccgggccattccagcggcgatcatgccgtccaccagcggggccagggcatcattgtaaaagctttcccccagccagtaatcaaaatggatgtcaagctggtcgtaaattttggaaagcccggatttggaaacttccacgcagcgtttccagatggccaggttttccccgtccccggcctggagcttcaccagttccgccttgcaggtatccagcagttccggcttttccttgcacatcaggttcacatccttgtacacccgcagcagctcgtcaatagggttggcggccagggcctgctcatccagaatattcttccagccccacaggatcatgccgaactgggtaccccagtccccgatgtggttgtccgtaatcacatggtgccccacaaaacgggccacgcgggaaagggcgtcaccaataatggtggagcggatgtggcccacatgcatcggcttggcgacgttgggagcggaaaagtcaatgacaatggttttgggggcctgcactttttccacccccagccggtcatccgccagcatggccagcaggcgcgctgcgtaaaattccggcctgatgcggaaattgataaatccgggcccggcaatctccagggagcacacggcatcctgccctatccggtccgccacctgctgggcgagcgcgcggggattcgtgcggcaccgcttggcaagcaccatggcggcgttgctctggtaatccccgaaccgcaaatccgcggagggcgtcaccgaggcgcgaaaatcagcgggaagcacctcccccaacaccgcctttaatgcggaggacaacttttcttcaagaattccgggtatggtcatgtctgcccagatgaacggacattccaccgccgtagtcaaggcgcaactgtcatcaagacataccttttccggtaaaaacaacaggacggagataacatccccgtcccagcttaacgaaccgaacgcccggcgcccgaatccacccttcccttcaacgggcgcttccttaaaaggagcgcattctggaagccttcagccacgcttccagttttttggaggctctggcctccctttcccgtttcttttccggcacggactttccggagaaagccttcgccagaaccgatgccagttttcttttcattttcattttatttatattacagtttttgttcctccgcatgcgggggtttgggaatcatcccgccccccctccggggaacactgcctacatactgtaccagataagtttagtccataagaaaaaaacaattccttgtcatacttgatacaataagacgtaaaacgttcattaaaaacatctctccatcaactcagcatcccctgctgcgcgtcaatcaaggagctagccatcctttattccccatttcctgcctccggcgcggcggcacgcttttcatggctgatccggcgcacgcttcactgcggatctgccgcctcgcgccataaagcgggctgccggaaacgatacgctgcccggaagccccaacagccccgcaccccatgattttccgcgcaggcgccggacaggcattaccggaagagggtctcctgcttcattcccccctgaaatcatatttctccgccttccacaggaacatgcgccgatacaggtggtattccgtcacgcaaaggacgggcatgccgatgatgccgatgaacggcagcaggcgaaacaaatgacggcacagaaaaagaaccaccatcaggaagctttcccggtacacggtcatgtacagggaatacgggttgatgagcgttctcctgtacagggaggaagccagcagcggccccaaaatgggaaccacccccagcacgaccacggcagcgaaggtccaccccctgcggcggccaatatacgcatcataccggtccacggactgctcaccctggagcaccgccttgccgcaggcggggcaacgctggtcaagagagggctcacggagaggctgcccgcagtaaaaacaccgccggtaactgcggagaacttcctcatgccttttccatccggagggaggaaccacggtgcgcagcctggaatatcctatccagttcagggcacggggggacggattgggcgtgccgcactccgggcagtgcagcccgcacgggtacatcatggagccgcatttggaacagaaaatacggtgggaatattcccggcggcggcaaaaaatgaagaaagccccaagccccagcccccccagcagggccaggatgatgactacccccgggtacaggagggaataggctaccaggtattccgaccaggaatggttcgactggtgcatgagggattccggaccgatgggattttgcgctacgtccggaagctggcttacgtatttttcacccatgtccctcagaggccccgcgggaagccattgttgtatgggaatgggttctttcatgactggacatgcagggttcgccataaaaacagcatttcccggaaggctgtcagaaaaacggcggcattcagcataggatgtctccgccggaataggtaggggaaaataggccatgccggaaaattccgccggaaatggggaagaggcccttttcatccggcgcttttccgtgtaatatttctgccatgccgactctccgccaagccgccaaggacgacatcacgctgatccatgaactggcctgccaggcttttccggccacataccgggacctcctttccagagagcagatagatttcatgatggactggatgtattcccccgccaacctggaaaaacagatggaggaggggcacgtgtacttcatcgcctcccatgagggaaaggactgcggctacctgtccgtccagtcggaaggccccggcgtcttccatttgcagaaaatctacgttctgcccggcttccagggcctgcatataggaagctttctgttccgccacgccatcagctacatcagaagcatccacccggaaccgtgcctgatgcgcctgaacgtgaaccgcgataacacccgggcggtggaattctaccagcgcatgggcatgcggaccctggaacgcggggatttccacatcggccacggttactacatgacggactacatcatgggactggatatagcctgaaacgcctctccctcaggaaaaaaacagccaaatcttcccagggcagggagtgccccggccagccccccatccccggcgcatgcgggccgttgaacccttcggaaacaccggttggaaattccgcttcctccttgacactcaatgcggcgtccttcatcatccgttccatggacgcctttcctgcctttattttatccggtatcatcgccgccatgtcggttcccgcctccgctcagacggcggaaagcgccaatggccccaaagtcacctatccagccttcaacgacggcagccatatccacgggccgaaactcaaaacttccgacctgaaagggaaagtggtgttttttgaatactggggcatcaactgcccgccctgcatcgccagcatgccgcatctgcaggaattgcaggaaaaattccagtccaagggctttactgtcataggcagccacagccagctcccgtcccccagagtcaaacagtttctggaagaaaagaagatcactttccccatttatcagagtctgagcattccggaggctccctgcccgggcggattgccgcatgccgttctgattggagctaacggaaaagtcgtggccaagggctatcctccccagctctatgacctggtgaaaaaggaagtgatgaagatggaacgcggccttcctattctggaaggagtggaactgaataaatacaaatcgctggccaaaacggtcgtttccaccggcagcaacatcgaatccaaaatcacacctctgaggaaaaaaacgaatgacgaggaagcgcaggccgtatgtgaagcttttgacgcatggttggaaaataccaaggaaatcgtgcaggcccggatccagtccgcccctctggaagcggtaacggccatcatgcgcctcaaaacggcggttccctccgtcaaggaatttgacgaacctctggcggccctgaaagcgaacagggatttatcaaaactggccgacctcaataaaaaaatctctgctctggaacagcgcaaggcaaaagggcgcaaaatatcggaatccgaccttaaatccctgacgcaggccgtggacaaattcacggagtccgacaacgaagccacgcaaaccgccgccgccagcctgaagaagaacctctcatctctggccgctccggaaactcccggaaaataaccttcccctccagcagccatttcctgccggcaggcgtctaagggcgcctgcttcttttttcaccggacgcctttttcttcttcccctccagaacagacggaacagccagaatggagcatgtctctctgacaagggaggaaagggtccggtcatcgtccagatccgtcaccaggaaatgcggcctggcgccgggataggggcagccctgctcctgttgcggaaacatcttcaaacccggctccgttatcttgacatacaactggttgtcacacaccaaaccgaagaatgtccggccgcagtacaatccgtagtccccaaacatttttctgaaggaaatatccccggcatgccggagctggaaacaaatatattctactacatccggggaagaggccatgacggactctctcatgcctcccccgtccgctgcaagaagcaaatgacggccgggaaggcttccggcaggaatgaggcatccccgttattgacgggaaaaggcgcagcatgccccacggagtcatgacggacggcatccatgccgccgcagccgctccgcaagaaaatccttcccggcgtctgcccggcaagacatgaacggcagcagcgattccgtccgcacagagccattcttatgattgccctgacggagctttttattcatgatgcccatgaaccttccatgaccgccgcgtccgacatcctctggaaaccagcctgcctctcccgccaggaagcccccacccttacggaaggggccggaacctgccagccgggaaacggtgaccggaacacctccgcgagccgtccggaaaaccatgaaaccatgggagagaaagaccacgcggaaaaccgaaaaacgccccggccgcgaagcgggcgcgtcatcctgctcaacggagcctccagcgcgggaaaaagcacgctggcccggaacttgcagcttctgctgaaagaggcagccatgattttctccatggacgattatctggccatgagccggggaaagcatgaaaccgccctggatgccgtcagggaatccggcctgcccttcattgaatctttccacgccgccattgccgaggcggcccggaaaggcgccctggtcatcgtggaccacgtcatcggagaatcccgccgctggattcaggacctcctgaaccgcctggacggcatcccccgcatcctggtcagggtggaatgccgccaggatgttctgctggagcgcgagcggcgccgcactgaccggactcctgctccggcccatgcccagcgccagcacgcaggcatccaccgccatttcccgcatgatttctccatagacacttccgcagacactccccggaaatgcgccatgcggctcatcagcctcctgccgggagaattcctgccctgatgccgtgggaacaggcggaagcctcccgtttgaaaaaacaggctgttcccgcaaacatgttggaaagacatgaataggactttacagagccgtctccttcacggtagcctgtgcccgcgcttgttgcacggagagatggcagagcggtttaatgcagcggtcttgaaaaccgccgtggggcaacccaccgtgggttcgaatcccactctctccgccaaacttcttttatgccgggtgcaagccatgcctgttttcacggaacagaaaaaggcaggcgaatacgacggccgccccggcattcccggaacggccctgagtgccttattgatccttcctcctgcctaagactccccattcagttcccggcggatgtattccgcagtgggggattctttcccggctatctgctccggcgtgccttccgccacgatggttcctccggcatcgccgggtccggggcccatgtcgatgatgtagtccgcctccgccatgatttccgtgttatgttcaatgacaacgacggtgttcccctggtccgccagacggtgcagcacgtcaatgagcagccgcacatcccgcggatgcaggccgatggagggttcttcaatcaggtacaggtctccgggcagttccctgcctttcatcagggcgttccggctgacgcgcggccccttgatgagttccgtcaccagcttgagccgctgggcttccccgccggaaagcgtgttggaggcctgccccagcgtcagataacccaggccggtttccgacagcagtttgagggggtccgaaatgcggggctggctttcaaaaaattccgccgcttccgcaaagtccatctggagcacgtccgcaatggtcttccccttgtacctcacggtcagggtggcggcgttgtagcgcttgccccggcaggtctcgcacggcacatagcaggggggcaggaagtccatttccagcttttgcatgcccgtgcccttgcaggattcacagttgccctgccccgtgttgaaggagaaacggccgcggtcaaagcccagcctgcgggcatccgccgtctgcgcgaacagggtccggatgtcgtccaggaaacccacgtaggtggccggggtggaacggggcgttttgccgatggggctctggtccacgccgtacaccatgcggatggagtcaaagccggaagaggttttccataattttctctgctccctcgtgagcttgtcgccgatggcctggcgcgcagccagacggatggttcccgtcatcagggaagttttccccgctccggatacgccggtgagcaccgtcagcctccccttgggaatggcaacgttcacccccttcaggttgtgcaggcagcagccctccacgcgcagccacgcggattcatccttttgggacggaatcctgcgccttttcccgcggtagggatgcctgggcttatggtgcagggccgcgcccgtgacggagtccggcatggcggccagttcctcaaaggtgccctgggccatgattctgccgccatgaatgccggctcccggccccatgtccacaatatggtccgcgcgcctcatggtatcttcatcatgttccaccaccagcagggtgttgccccggcgtttgagttcatccagcgtgcccagcagcaattcgttgtcccgcggatgcaggccgatggtcggttcatccagcacgtacagcacaccgcggaggtgggaacccagctgggaagccagacggatgcgctgggtctccccgccggagagcgtcgtggcgctccggtccagggaaaggtagcccagccccacccgctggaggaagttgaggcgctgcgtgatttccgccactacgtcacgggcaatgagcgcttccccccgttcaaattgccaccctttgaccagttctgcggcggccacggcaggcagggaggcaatgtcaccgggagtcactccctgaagccgcacggcgcgagcaaattcattcaaccgcacgccccggcaggcagggcaggttgttattcccttgtcatcgtccgcctgccgcgccagttccctgtcatatttcagttcagcctccagcagggattgcgcctggtcttcctttactttccccctgccgacgattccatgcccgcggcatacggggcaccacccgcgcggagagttgaaggaaaacgtgtacggttccagttccgggaaagattgcccgcaggaggcgcatgccagcctggtgcccatcagttccggacggacggaaccgggcgggagcacctgcaggaacccttcccccatctccagagcggcatgaaccgccccggcaagcttttccggcggccaggaggcctccggccgtgcaacgaccaggtccaggtcatggctggaatagcggtccagcggctggaatccgctcaggggaaccagtttgccgtccacccacatttcctcatatccctttccttccgcccagcgggccaggtcggcgtaatgccccttgcgtcccctgacgaggggggccagcaacgcgagtccgccatgttttttcagttccctcgccaccagctccaccacttccgattccgaccttttgcccaccggaacaccgcactgcgggcaataggcctgccccagcttggcatacagcagacgcatgaattgccagatttccgtgacggttcccacggtggatttggtgcccccgcgggacatgttctgttcaatagccaccgtggggggcaatccggtcaggcggtcgatgtccggactttccagctgttccgtgaattgccgggcgtacggggacatgacgtccatgaaacgccgctgcccttccgcgaaaaagatatcaaaagccagggaactcttcccggagccggaaagcccggtcagcacggtcatttctccgcgaggcacgtccaggtccacgtttttcaggttgtggtggcgcgctccccgtagggccatcacgccttccggtatatccatgtctgcggattccgggacggcggcgtccgcagggtcgtaaacggaagggttgccttccagcacctccctgagatatttgcccgtgtatcccttcccggcggctacaatttcctccggcgtgcccgtggccaccacatggccgcctccggcgccgccctccggccccaggtcaatcacgtagtccgcggatttgatgaactccgggttgtgttcgatgaccagcagggtatgcccctgctccaccagttcccgaaacacggccagcaaaacttcaatgtctgcaaagtgaagccccgttcccggctcgtccagaatcagcatcttggagctgttcgcgccggaacctatctggtccagcaggattttagccagcttcaggcgctggttttccccgccggaaagggtattcagaggctgccccagggtcaggtgccccagccctacgcgctgaagcacgcccagtttggaagcgatgcgggaggctttggcccctttttccgcgctgaagcattccagcgcagccgctaccgtcatgccgagcacgtccgcaatattcctgccgccacggtacacgctcagcacttcgctcccgtaccgggagccgtggcacagcggacactgaacgaaaatgtcggaaagaaactgcatttccactttctcactccccatgcccatgcagcgcggacaccggccgtccccactgttgaaagagaaaaaaccgggcttcatgccgcgcgcgcgggccgtctccgtttccgcgaagagggagcgtatttcttcaaaaactccggcatacacggcaggggtggagcgcggggtgcggacgatggggctctggtccaccatcaccacctcatccagatgttcccagcccttgatagacttgacgcgggcgggttcctcctcgcatacggctcctttctccaccagcgcgttcaggtaaagaacatcgtgggccagggtgcttttcccggacccgctgacgcctgtcaagcaagtgaaaacgcccaggggcactttcacgtccagtttgcgcaggttatggcgcgtggctccggatacggtcagaaactggcgcggctttcgcctctttttgggcaccgcgatgcgccgcctgccggaaagaaaagctcccgtcagggattcctcaatttctccaatccgggcaggcatcccggaataaaccagccttcccccttcccgtccggaaccgggtcccatatccaccaggcagtccgcggcacgcatgaccgcttcttcatgctccaccaccaccagggtgttcccgcgctttttaagccggttcatggcggaaatcaaacgggacgtatcgcggggatggagcccaacggtaggttcatccagcacaaacagcgtatccgtcagggaagcgcccaggcaggtcgtcaggctcacgcgttcaatttcccctccggacagggaccgcgtggagcggtcggacgtcaggtagcccaatcccacttcattcagatattccaggcggctcctgagttccgccacggcatgtttcaagccggggtcttcatccgcccgcggcgtcacgtacctatccacccaggccagcagttcatccatgggcatactggaaagttccggcatgcttttgccgcccaccttgaattgaagggcttccggcctcaggcgcaaaccgtggcaggaggggcattcctgatatgtgcggaaacggctcaggtacacccgcacgtgcatcttatgcgtgcggctttccagatatttgaaaaatcccgcaatgccgtaccacagcccctgttcatacatttcatccgggtcatcgccgtcgccgtacagcagccagtcccgctcccattgcttcaaatccttccacggcacatccagacggactttgcgggcgtttttgcgccagccgcgcatcaggtcccgcttgcattcggaaaatacttttccgtccccctcaaaaatatggatggccccgtcctgaacgctgagttccggcttgatgcaccggttgtagtcaatcgtgatgacgcgcccgtagccgcggcattccgggcacgcccccagcggggaattaaaagaaaacaggcccggccgcggttccatcagcggatgccagtctccgcgggatttcaaagcggacagccagacgccgtccacacggggaatcacatgggccacgccgccgcccagacgcatggccgtttccagagcctccagcctgcgttccctctggtcttccgacagcctcacgcggtcctgaaccaccagcagcggttctccttcctccagcgtccaatcctcatcctccagccggaggatctctccatgcgcaaaagcgcgcaaatacccctgtgccaccagattccttttcaacgtgggaagatccacggattcgggccgcgccacctccaggcaaaccatcacttccgttccggcagggaattccgcatgcagcttttcatcaatggtacctggcgtttccggcttgatttcccgccctgtttccgggtcaatgcccacggccagacgggcgaaaacaaacttccagtaatcattcagccccgtcatggtccccaccgtggagcgggatgtcctgacggagttgcgctgatgcagggcgatggccggaagaatattctctacggcgtccacatccggcttgtccatgcggtccatgaactggcgcacgtacggggaaaaggtttccatataacgccgctggccttccgcatacagcgtgtgcatggccagacttgttttccccgatccggaaggccccgtcaccaccgtcagccgccccaggggaatgtccacatccacattctgcaaattatgctcacgggcgccgcggatgcggatgcgcccatcctcacaatgactcatggagaaagaatatcatcaatttggaatcattccaagagaagcgcctgtcatgaatccgggtttccagaggagtccggccaggtccaacctgcctattacgtcatcatcagcacaaatggagggccgtgcttgcatttcttccggcagccgctagtatttttcgattcttagaccgctgaaagcgactctacctcgtcaattttcaacaagacaaagatgattaagtggattctaaccaagattgtcggcaccaaaaaccagcgtgaagtgcgccgtctgcgccccattgtggaacaaatcgtctccattgaagaatcatggaacggcaagggccaggaattcctgcttgagaaaacgagggaatggcaggggtacctccatcgcttcctccccatggatctgccccccgtgcgcattgtggaagccgcgcccagggaagagctggaggaaatagccgccaaactgaacgcccgttttgaatccctgaaaagcgaactcgcttccctccctgcggtggaagccactcccgcctccattgaagaagggaaagccgcctggaacaacattacgccccagtttgacaagctgcgggaacgctacctgaaccagatactgccggaggccttcgccgccgtcaaacacggcgcccgcctgctctgcggggaagaacgcgatatctgcggtcaaaaacaggtttgggacatggtccactttgacgtgcagctgctgggcggcattgccctgcaccgcggctacattgcggaaatggccacgggggaagggaaaacgcttgtagccaccctccccgtttacctgaatgccctgaccggcatgggtgtgcatgtggtgaccgtgaacgattatctggcgcgccgcgactcggaatggatgggcatgctcttccagttcctggggctgactgtcggctgcatccagagcatgatgccctcccagctccgccgggagcaatacgcctgcgacatcacttacggcaccaacgccgaattcggcttcgactacctgcgcgacaacggcatggcaacctccaagtccgaacaggtgcagcgcgggcactacttctccattgtggacgaagtggactccatccttattgacgaagcccgcacccccctcatcatttccggccctgcggtcgtcacccgggaacagcagtacgataccctgcgccccgccattgagcgcgtggtgaaggcccagacggacctttgcaacgaactgatggcccaggccctgaaagcccaggaagaaggccgcacggaagaagtgggccgctgcctgttcaaagtaaaaatgggccagccccgccaccgcgccttcctgcgcgccatgcaggatcccgagctgcgccgcatcgtggaaaaatatgaactgaccctttaccaggatacccgcaagaaggaactctacaagctgaaggaggaaatgttcttcaccgtggatgaaaaaacccacgacgccgacctgatggaaaaaggccgggaagtcatctctcccggccatccggaagatttcgtgctgccggatctgggaaccgcctttgcggaaatggacgaagatccgcgcctgacggaaaaagacaaactgcgccgcaaaaatgaactgaccaaacagcttgacgaaacgggagcgcgcctgcacaccacctcccagctgctgaaggcctactgcatttacgaaaaagacgtggaatacgtcgtcaaggaaggcaaggtcatcatcatcgaccagaatacgggccgtgaaatgccgggacgccgctggagcgacggtctgcaccaggcggtggaagccaaggaaggcgtggaagtggagcgggaaaaccagacgtacgcgaccatcaccatccagaactacttccgcctgtacaaaaaactggcgggcatgaccggcacggcggaaacggaagccgcggaattccatgatatttacaagctggacgttcttcccatcccgaccaaccgcccctgcatccgcaaggatcagaatgacctcatcttcaaatcccgccgtgaaaaattcaatgcggtggtcaacaaaatccaggaacttcacgataaaggccagcccatcctgataggcacggccagcgtggacgcctccgaaacgctctcccgcatgctcaagagggccaaaatcccccatgaagttctgaacgcaaaaaaccaccagcgcgaagcggaaatcgtggcgcaggccggcaagcgcggagccgtcaccgtctccaccaacatggcgggccgcggcacggacatcaaactgggcgaaggcgtagccgacctcggcggcctcttcgtcctgggtacggaacgccatgaatcccgccgcattgaccgccagctgcgcggccgctgctcccgccagggggaccccggcgcctcacagtttttcatctcctttgaagacgacctgatgcgcaacttcggcgcggcggaacgcatgaccaagatgatggaacgcctgggcgtagccgacggtgaagcgctggaacacagtttcctgaacaaatccgtggaatccgcccagaaacgggtggaacagcgcaactacatgtggcgcaagcacgtgctggactatgacgacgtaatgaacaagcagcgcgaaatcgtttacggataccggaatgaagtgctttccacggaaaacccgcgcgaaatgatttacgatattctggaagaagtaatcgccacgcgcgcccatgaattcctggacccggatgcggaaggcgtcacccacccggacgaattgctcgcctggatgaacgcctccttcccgctggggctcacggcggaggccgccaagctggaagaacggcccatagacgacaccattgccttcctcattgacaaggtcaagtccacttatgaagacaaggcttcccgcgaacgcccggaatacctggaccacatggaacgccagatcatcctgggggccattgacaaaatgtggcaggaacacctgtacaacatggactccctgcgggaaggcgtgcgcctccgcgcccaggggcagaaagaccccctggtggaatacaaatcggaagcttacgatctcttcatcaccctgatggaaagcatcaagagcgaagccatcagcaacctcttcaagagcaccaccaacctggacgcctttgaggacttcctggccagcctgccccagtttgaatcttccgacgaaaaccaggaaggcggaaccagcctgccggaaatcggctttgacggcatgccttcggacctgctctccgccctgagggaacaagtctcccgggcacgtgaacaacaatccgcccggcagacggaaccggaacaggccccggccgtcatttccgacgccaccaccattggggaaggttacaaaccagccgtggcggaacccaaactggtcatgcccaagcgcaaggtcagcgtcgtgctccgcagggaagaagccccccaggcgccggcggaaacgccggtccccggagaaggggaagaaattgccgtcactctggactcccaggactttgcggaaaccatggacaaccgggattccgcggatacccgcacattctaaaaaaaccgcgcatcacttacaggccgggggaaacgggaatgtccgttttccccggccccaaacttccggtccgccttggctatgctccctcccaacaaatccgccaatgtccgttccgtgctggagtatgttccgtacttcagggataaaatctttgccgtgcacgtggaacgccccctggtggattccggggaattggtggatgccctgctggacctggacgtactgcaggaaataggcgtcaggcccgttctgattgtggaaggggcggacgcctccgcgctgtacgaacacacgcgcgtctgtgaaatgcgctccgccctggtggaagcgccgttgaagggcggccagcttgtccgggaaagagtccgggaaattctggggcgtcaccaaattcccgtggtggcttccggccgttccggctcctttgacccggaatccgtccatatggccttcagtctgggggcctccaaatacatcgccctgctcaatgaccacaaggttccgtccctggacggacgccccattgccgccattctggaatcggaagtagcggagctggcaggaaacgtaacccaccgcgaactgcttgaccaggcagcggaagcctgccgggcgggaatcccccgcgtgcatctgctggacggaaaaatgcgcggcgtgctggtggaggaactcttctctgaagaaggcgtaggaaccatggtccacacggactcctaccgggaaatacgcccgctgaaggaagaagacattccggaactcctctccatgatcgcccgttccgtagtggactccaaattagtcaaccggaactatgaagacattgccgccagaatagacagttactacgtgctgaccctggacgacagcatcgtgggctgcgttgccgtttatccctacccggagcaccatagcgcagaactgggctgcctgtacatcaagcaccgccatgaaggccgcggctatggccgcgcactatgtgaatttgccaaaagaaaagcggaggaaatgggaatggaattcatcttcgccctctcccaaagcgccgtccattacttccgggaccgcatgcattacgcggatttttcccgcgacagcctgcctccggaacgcctgcgcactctggaactcagcgggcgcaaatccggggttttcggattaaggctgaaatagttttctatttacctatctgccccattcctgcttatgggcggaattccctgcaccaaatggacgggtagctattcccgtctctcgttaaagggtatatagtaaattcgggaaaggtattccatttctcttttcctcctgaaattttctgcccgccgaaaaaaatatcagcaacaataatttgataataaaaatcttataaaataaccacataactaaaaaagaattatgcggatttttaatccgtccccggctacggcttctccgagcctttcgggtttagctgctctgatgatgcgccgcagcatctaaaacccattctccccccctccgccgcatttccaaaaacaatgcggttttttattttccagtacctgtccggtatcggagccttcacttcatgcggcatcctgaacggcaaaatcctgagaaaagaaaacgcagcttctcacaagcgggattccaatccaacattcatatccccgtgtggatatatgcaccggaataacagtactccacggttttccagagcggaaagtgccggggggaggcttccaattgtcaatcaagctgtgcatcattgtgcatgcttttttgaccatatgataccctttttcactgttttctagcatgatgtgcaatatatgcactaaaagtaacaagccccttaaaccgttggatttaaggggctttgaagatggtagcagggaggtgatttgaacacccgaccaaaggcttatgagtcctctgctctaccactgagctaccctgccgttaagtggttgatgccgtaaggcggggaaatatttaacccggatcggaaagaatgtccagatttttttatggatcaggagcattttatcacggcaacccgccttcccctccagggaaatcattacggatgaagcatttttcactcaaccgtttcatacagcctgtgtcccatgccgtttcctgcatgcgggcatttacggcacaggacattatgatgccttctgtcccatgccattgccgcagcaggacaggaaatagaggcccataaagattttcgggtccaccacttttccctgtcccatctgctccatcagccagtcatgcacctgaggaagaggaatgcggtgcacagtaatattttcgtgggccacaccgcctcctgccgatattcgatgcaggtcttccgccagatagaaggataccatttccgtagtcaatcctggggaagaaggccccgcaaaaagatacgtccaggagtccgcccggtatccggtttcctcttcaagttcacgccgggcggattgcagcgtgctttcctccccttcatccccggaaatgcccgcaggcagccctacggtccgggcatgcaggggaacgcggtattcttccaccagcaacagttctccttctttcgtcacggccacgatcatgacagctccgctggcattaacccggcgcacgtattcccacctcccctctttcagaagttccagaaatttcccccggtagagagacaggcatgcttcccctggctgttccatttgttccatgatgcagccacgttaggtttccggacggccgttgtcaaccatgcggaccgcctccctcctgcatcttcccggacagttccgttccggtccctgtaagtggttgatttccggcggcgtaatcatgcacttttcgtcacccaggccagtaacaaaacaacaacacattgatgatgagtaattaacaatgtcatacagaaaatatactcaggaggactaaattatcggaggaagcaagaacaaaatattttttcatgtggaacccccgtggaacgtagagccgcagaacgatgactcgcgctgtttcaaaaagatattttttcctcagacgcaaatcagtaatttggcgctcccgtcaaccggggtgttgagctgaaagcggatgagttcgccttctccaccccgatggacgccacgagctgtcacggctgcggatgaacctgatccggttccatccgcgggcggcctcgtagcgggacggaacgccttacggctatttctaaccagcaacatcttttatttccaataacaatgacgccgccatcagaactgtcagccacctggtccaaaatcacgggagccttgcaaacaatcatgtccccggaggtttatggattgtggtttcccaagttttccctgctggaggattcagggaaggcgctgacgctggtatgcgacgatcctatggccgccctctgggtggaaaacagctatacgccggagctgaagcaggccgccatgctggctctgggcacggaacgccagatcaaattcgtctgcacggatgaagtggcttccatgcccgctgcagaaggccagccgcaaaaagcttcttcccgggccaaaacgccgcaggcggcggattccccggccgcaccggtcaaaaaacagcgtacatcggccgccagggcatgcctgaatgacttatatacgttcgattcgttcgtggtgtatgaggacagccgttttgcgtaccaggccggactgtccgtcgcccagtcggaacgggccctgttcaatccacttttcctgtacggtaaatccggcgttggcaaaacccatctgctccaggccattggccatgaggtgctccatcaggattcatccacaaatgtggtgtacgtcacgggcgaacagttcgccaatgaatttattgacgcttcccgaacccagaacggacaaagcttcaccaaactgcgccgcaagtaccgcaaggcagacgtcctgctggtggacgacgtgcaatttatctccggcaaggaaaaaacggtggaagaattcctgcatacgtttgacgaactgttccatgcccacaaaaccatcgtgatttgcgcggatgccgccgcatgcgatatttccaatctggacccccggctggcggcgcgtctggaatcaggccttacggtagaattgaaccttccggacgacaatgcacggctggagatcctgcgcagcaagcgcgaccgggccggcatgaacgtatccgacgaaattctggagtttctggccagccgcatccagaagagcgtgcgccgcctggaaggagcactgctccgtgtagccacctttacttccctgtccggagacatgcctgacatcgccaaaattgagcagcttttacgcgacatcctgcgggaagaaacaagccgcatcctgaccgtggattccatccagaagcgcgtggcggatttttacgaactcaaggtcagcgacctgaccggcaagcgccgccccaacagcatcgcctttccgcgccagatcgccatgtacttgagccgccgcctgacggaacgctccctgaaggatatcggccaggcgttcggcggccgggatcacggcaccgtcatccatgcgaacaagctggtcgcctcccgtatggaagaggatgtgcgcgtgagggacatcgtccagaggctggaagaggagttgagggattgattttccttccctccagccctgctggaaaagcatggtcccgttgaatgcccatggcttttcaagcggaagaagcgcttccgcggcgcaggggagaataagcttgaggcgaaagcggtttggattagaatcaccctgttcccattgattccatgatccacgccgaccagctttccaaagagtttggccgctttcaagcggtaaagaacgcctccttccagattgaaaagggggaaatcgtagggttcctggggccgaacggcgcaggcaagaccacgactttgcgcatgctgaccggctatctgccccccacttccggcacagccacgattgccgggttcgacattgtgaaaaatcccctggaggctcgcaaacatctgggctacctgccggaacacgtgcccctttacgacgaccagcgcgtcacggaatacctgaaattccgcgccaggcttaaaggcatctcttccaggcagatctggcctgccgtctccaaggttgtagaacaatgcggcctggatcccgtgcgccgcaagatgatccgcaccctttccaaaggctaccgccagcgcgtaggcctggcggacgccctgctgggggaaccggacctgctgatccttgacgaacctaccaacggtcttgaccccaaccagatacgccagatacgcgagctgatcaaaggtctggcggccaaccataccattattctttccacccacattctcagtgaggtggaaatgatttgcaacaaggtcatcatcattgaccagggaactatcaaggcagcggataccccctccaacctgacggccaatctacgggcagccggcaagattactctggaattccggggagacctggccctgattacgcggaaactggaaaacctggaacatgtgaagaaggtcattcatgaaggaacggacgccgacggctggcatacgctgaccgtacgcgcggaggccgggacggatacccgtgaaaaggctgcgcgcctccttgcggaacagggctgccccctgcgccatatttaccgccacacccccacgctggaagaagtgttcgtggaaatgacccgtaaagattaaccccccccttttttccatccccgcctatccaccaccgcccatttcccttttctccccatgtctccagtacttaccattttcagaaaagaactcagaagctacgtaatgactccgtacggatgggttatcctggctttcgtcatggcccttcagagcgtctccctgtccggcacgctgaaggcttttcaactggccccgcagaaggaaggcatcctgttcttcatcctgcattctcccatgttctggttttacttcctgttcatcttccctctgctcaccatgcgttccctggcggaggaggaaaagacgggaacgctggaatccctgctcaccacgcccatcaagacatggcaggtggttctgggaaaatatttctccgcatacgccttttacatcatcctgtggctgcccatgcttctctatcccatcttggcggactggtccaacctgattgtgcagtggatttacggatatgacgcgggcatggttctgccttaccgcctggcggactgggccggggcatacgccattctgctgctggtcggcgcctggttcacagccatcggcattttcgcctcctccatgacgggcagccagattatttccggcatcatcaccatcggcctgctggtcctgattttcttcatgggtctgattcccgtggtgtggggggaattccccgcagcggggattttccactacatgtcctgctcggaacatctggaccgcttttccgccggtctggttgacacgcgccccgtcgtgttttacctgaccatgacagtcctgacgctggccgtcaccatccgcatcattgaccaccgccgctggaaacactgactcatcccgccttcaccacttttcatttttatctatgagcgaaacaccagacacccccgccgcggcagcagaagcctcccagcccgccgcccgcaaggtcaaacgcccctggatgacctggatcaagcttttcctgctgttccttatcgtcgtatgcctgaattacgtaggctgccacgagtattaccgccgggacctgacggaagaccagcgttatgaaatttcccgtcagagcatcaacatgctccagtccccggaaatccagaagcgcaaaacccccgtcaaaatcacgttcgctttcctgcgcaccacgcagaactacacccgcatgcgttctctgcttgaggagtacgaacgttattccaacggcaaggtgaaggtggagtatgtggatcccctccgccagccgaacaaggcccgtgaaatctccaatatctacggaattgaattcaagaagaacctggtcatcattgatgcccgggaagatacggaaaaagcgctcaagacgtttgaaggcacccaggcggacgccgcccacgtgcgcatcctgcccggagacgccttcgtagtatacgcacccgggccggacggcaaaagcatgaaggcagtggcgctccagatagaagacatgatgactgcaagcatttacggagcggccaacggcgaacctcgtaaaatttatatcgcggcggacaagagcaacttcaacgagtccctgagcaacaaccaggaagaaagcattttcacgacgctgggcaaaatctgccgttccgtcaacctgcagcttgttcccatccgcatgagcggtctggaagaaattccggaagacgccgcaggattcatgattatcggttccaaatatgatctgtccccgcaggaggcggaagtgctccagcggtactgggcacgcccgaacgccgccattctgatcatgctggaacctcagaatgacacacccaaacagctttaccgctttctccgcgaacaggggctacggccccagaatgaccgcgtgatgctccgcaacaggggcaaccgttccgtttttgaaattaactccattttcgccccctccctgaattgcacccgtgaattctcgaattccagcaccggactggaaggggagagcatctccctcattctggattccgacaatgcggccatggaacagaagcgcattacgccataccccctcctggtcacaacggaggattattacggagaaaccaaatacaaccagttccctgcccagttcgacgcaagggaagataatccgggccctctgatgatcggcgcggccctcatccgggggaatgccggggacgtgaaccagaacaagactaccgggcgcctggttctgcttggcaatacggacctgctccagccccggcaaatcaaaccggaacagagggatttcatgcgtacgctgatcggctggatgacggaccgtgaagaattgcgcggcctcggctcccgccatgacctgaccgtcaagctgaatctggaccgcaacgccctgggcgttttggaactcctgacgaatatcggactccccctgctggcgctgctgatcgccctgattatctggaacacgcgccgtcattaactccacccacgcccattaccggaagcacatgcgcacattccgttttattcttctcatcctcatcaccctcgcttctgtcggagcagcggtgctcctcatgattgacggcaatctgtcccgcatcatcgggcgcaccgctttcagttccggagaacggcttttcccgtacacccgggaagaaatgaacgaggtttcctggatgcgcatcaattgcgtgggagatgtcgcggaattccgccgcaaacccaacggcgtctggtggtgcgaaaagccctggaacgaccgtatggatcctcgcgcggcggcggccattctccagtacacgtactccaccagcatcgtggacgcattgcccctgcacaagattgattccgcatccctgaaggaattcggcgtgaaaaccactcccgttaccatcactctcaaggaaatgagcgacgacggaaagcgttcctccactgtggcgcgctatacgctgggttccccggcgccctggctggtggacgatccggagaacaagaccacggatgacaccacctatatgcagacggatttttacggccgggacacccgcattctggtgggcaccggcaacatcctccctctgttcaaatccggcatccgccagcttcgggaccaccgtcccctgctcctgcatccggccatgcccgcctccattgaaatcaacaaccggggccagcgcatcgccctggagcgcaaaactcctagctccccctggaaaatcacgtatcccctctccctggatacggacccggccatgatggatgtgctgctgggcacgctccagaagctgaccgccgtgcgcgtgtacaacccggaggaaacgagcgtgccggatatgacggatgatcaaatcacctccgtctccatcaggaatttcacaggccgcctttcaggggacggcaaatccctgcaaatggaggaacagcccgtcacgctccggatttatcctccctcggacaacggaagcctgtccgaactggtcaaagccaccgtttccgaccgtaaggccgtctttgaattggtgcaaacgacggaaaccaacaaggaagttcccggcatacgcaatattccgctggatctgggccttctgcgttccaagcaattgacggacatcggggattacaagattaccggcctttccatccgtaaaagttttcaggattatcctaccatcgcccgcttcattcagggggatgagaaaaaaggcatcaagcccacctggctgtacacggcagagggcgcccgttaccaggaagctaatccggagcatctcatttccctgctgaaaaccgttaaacagggaaaagtggtaagcttcgcttcggacaaagttacggacctttccgtgtacgggctggataatcccagaatgacgctcaccatgtcccttctgcccaagcccggtgaagagccccgcccccctgtgacggtgtttttctccaagggtgcggacggttcctggtatgcccgccaggccggaaaacccaccgtcgccatactggacaacgcctacatgaaggatttgctgacggatgcactggcctggaaaaaaaagaggcttttttccttcagcaggtttgacctcagagaaatgcacctggaacgcatcggttccggaggccccctggttctgaaattcgaccgtctggacgattcttggacagcctccaaagacgggaaggatgaaaccttgaatatcaacccgaaccgcgccaaccgctatctggatgaactggaaaaaatggaggtgagcacctggctcccctatacggacgccacagcgcatgaagccctgaaaaatcccgttttccgcctgaaattcatcctccagtcttacaaggaggcggcccccgtgcaagcccaatccggttccagcgacattacctttgccccggaaccggaaacggaggacaaagtcatcacgctggaaatcgccccggcgggagaggccggatacagcagattttattacggcagagtaaatacaaccccgaattattttatcctgaacatggacgccgtacgtctgctcggcgccagcctttcggaagacaactaaccactcctcccgcatgagcaagattgagctgcacaccgccatctcctttctggacggaatcctctccgtgaattccattccggacgccccccgcgccctgaacggccttcaactggaaaacgggggcaccgtttccaaggtggccgccgccgtggacggctcagaaaaggccattcatgcggccttggaaacaggtgcggacctgctccttcttcaccacggcattttctggcagcccatgcagcccattaccggcatcgcctaccggaagctgaaagccgccatggacgggaacctggcgatttacgccgcccaccttcctctggacgtccaccccgcatacggcaacaatgccctgctggcgaaggcctgcggcctccggccatgttcccatgatgggctggactaccacggcgtttcccttggcacgcacggagaatttccaggtacatgcgcggaattggagcaaaaactggaaaccgtcctcggcgcgcccgtgcaggccttctggaaagattccccggaggctccggccggagatgtcttcatctgtaccggaggcgcgggagacgatcttgcccaggcagcggccctcggctgccgcacctacgtgaccggggaaggctcccactggaacatccccctggcccaggaactgggcgtcaatctggtcttcggcggccactactttacggagacgttcggcgtaaaggccctggggcttcttctcaaggatgtctacgggctggattatacctttattgacctgccgccctccgcctacagccattgaccaaacgccacggaacatgaatctgactacggacgacgccgacgggaaaatccgcctggatcaataccttgccgcccaccttccggagctttcccgctccaggatccagagcctgatcaaaagcggggacgtgttggtcaacggctttcccgccaagcctaaaaaccccgtctcccgcggtgattccatcaccgtccgcattccggaaccggaaccggcggaagcccagcctcaggatatccccctggacatcctgtatgaagatgaagacgtggtagtcatcaacaaggaaagcggcatggtcgtgcatcccgcggaaagcaacccggacggcaccatcgtaaacgccctgctccaccactgcggggacctctccggcatcggcggagtggaacgcccgggcatcgtccaccgcctggacaaggacacctccggctgcctggtcatcgcaaaaaatgacggcgcccaccagtccctgacggcgcagttcgcggcccgaagcacggaaaagcgttatctggccgtcatccagggtattccttcccaaagttccggcacggtcttcacccatatcggccgccatcccgtcaatcgcctgaaaatggcagtagtcaatcccggttccgggaaagccgccattacggactacgatttgctctgcgcagacccgtccacggactcctccctggttctgtgcacgctgcacacgggcagaacccaccagatacgcgtgcacatgctccatctgggccatccgctcatcggggatcccatttacgccaaacccgcccggcaaaaggcaaaacccggcaggctcatgctccacgcgtggcggctgggcttcgaccacccgcgcacgggaaagcgcatggatttcgaagcgcccgtcccgccggaatacacgccgtggctccagctcttccccaacgggctttacggggccatcccggagccgcgcccggtacaggaagacgggggacggaactaaacctccccgccatttcccggcaacggaagccgcttcaacggacagaatacgggaaagcgccatattcaaatcccagagccggcccggccttcgtcagcaatccgccgtcatccggcgcccccatccttgcggacaaagatgcggcaacagacccgccgttcaccttcttacgccccctttccggcaggagcgtccacggtcacagtcagccgggaacaatattcttttcatcaatcaaggagaaatgaacctgcccggcatcttccgggcatgcaagaagaatccgcggcggagacctcccctttaatcttgatttgcccccccggaaccgctaccctgacacggctttaaccacacagctttcacagagacatggagaccacgcaccacggggaggacgcctctccggacaatccccccaggcagcaaaaaagcggaaatacggatgaacagaccatcgccctgacaaaggcgcgtctggccattgacgaggtggacgcccggattgtagagctgttaaaaaagcgcgccgaatgggtgcatgaagtcggccgcattaaaaaggaaaaaaattcccctatcttcgttcccgaacgggaaacggccctgctcaacaaattgaaccgcctgaatgcgggcgtgctgccggaggcttccctccaggctatttaccgtgaaatcatttcctgctccttctttctggaaggcggcctgaccattgcctacctgggccccaaaggaacctggagtcaccaggcggccctcaagcagttcggaaaaagctgcgaactcattccgtgccagagcttcaaggacgtatttgacatggtggaccgggggaaggcccagtacggcgtagttcccgtggaaaactcttcggaaggttccgtcaccgccgtgatggatcttttcgtcacctctcccctcaaaatctgcgcccaaatcaatctgaacatccgcaacagcctgatggcggatattccgcgggaacacatccgcatcctgtattcccacccccaggttctcggccagacgcggaactggatccagcggcatttcccaaacgcggaactcgtggaaacgtcctccaccacgaaagccagcattcttgccaaggagaacgccgccatgggcgcggcatccctcggctgtccgctggccgcggaattgttcggcctgaacatcctggaagaagacgtgcaggaccagtcctgcaacaccacccgttttgccgtcatcggacgccaggaaacgcatcccagcggcagggaccgcacctccctgctcatccgcatccagcataaacccggcaccctggcggaagtagtcaactgcttccagcggcacaacaataacctgatacgcattgaatcccgcccgtccaaagtcatcaactgggaatacgtcttttacatagatgccgcaagccacattcaggaatcccccttacgggaaacccttccggagctggagcagcactgctccatgctgaagattctgggcagctacgcggatacggacgtcatttaagcaggttcagccttcctccccagcctcacaccattctgaacaaccatgaacatagccacgattgccgccctggccgtcactctgggacttcccgccccggcccagcagtccgccactaaaatcattacggaaaacggacagcctgcgctggccctggacgaacagttcgcagcccggctgcgcgacggcggaatgaagcagggttccccggccaccgttccgcgcgatttttcggcagcagcgcccggcctccccctccctgcggatgccaaccatgccgctgtcagggaaacggcgggggaacgcaaccggcgcatggaatggtggagggatgccaaattcggcatgttcatccattacggcctgtattccggattggccggggaatggaaaggcaggcccggaggttccgaatggattcaaaaaaacgtggaagtggatacggatacctacgccgcggaagctctgcccctgttcaagcccagggaaggcctgacggaagaatgggcccagctcgcccgggatgcgggctgccaatatgtagtgctcaccagcaagcaccatgaaggcttcggcctgttcgacagcgccttgacggattacgacgccaaaagcgccgtgaaccgggatatcatccgcgaatatgtggactcctgccgcaagcgcggcctgaaagtgggcctctaccactccgtcattgactggcatcacccgtcctatgacaacaccatctgcccggacctctgctaccctgcgggacaggcggcaatgcttaacaggaaaaacattccccgcgaccacgccgcttaccagaaatacctgcacgcccaggtccgggagctgatgacccgttacgcgcccatcgacatcatgtggtgggattactcccagggagccatggagggggccaaaggctggaaggcgccggaactgatggacatggtgcgctccatcaatcccggcgtcatcatgaacaaccgcctgtacgcttattccggcctgaacaaaaaccaggccggcacgctggacctgcgctgcggggactatattaccccggaacgcttcatcccccggcgcggatatcccggcgtggactgggaatcctgcatgacggtaagcgacaaatggggctacaaccgctacgacaccaacatcaaatctccggaaaccatcattgaaaaactggtggaatgcgttaccaagggaggcaatcttctgctgaacgtcaatcccatggcggacggcaccattccggaaaaagtggccgccaccatgcgcggcgtaggccgatggctcaacatcaacggtgaagccgtgtacggaacacgggcattcatgcagctggaccagcctgccaccatcaatcggcagggggatatcttcgtcttcctgattcccccgccggacaaggagccgacccagccgcccagtgaaggaaccatgaaagaattgacggcgggagcggaacacgcccgcatgcagccgctggatgccaccggctacgaaaatgacgggggaacagccgtcaccctgcccgctagctattccaaagcattgcttctgggggacaacaccgcccttcccgtcgtcaacggaacggtcctgttcaaggctcatgaacattccaaaactccctgttccgtcatcaaactgagcaaatagccattttccccactcatttttcctatggaggaagaccttttttccctggcagcaagcaaacagccttcacagcaggcaacaaatgaaacggcaccccgggccggggaggcgcgggaaaatgccggcaccgaccaccccggaaacgcggaggaccccgctcaccgccgcatagactatttgcgttccgaactgcgccgccacaaccgtctgtattacgaacaggcggaaccggagatttccgacgcggaatatgacgccctgttcctggagctggaaaaattggaaaaagcccatcccgaactgtcggatccggactcccccacgcgccgcgtaggcggcgcccctctccagggcttcaaccagatcagacatgcggtgcccatgttgtctattgacgacatttttgagcagcgggacgcccccgtaccggatgaagaactggcggaattctaccataagctgtccagggcgctgcaaacggagaacgtgcccgtctccgttgagcccaagattgacggagtggccctttccatcatgtaccgcaatgggaagctggcttatgcggccacgcgcggagacggagacgtgggggacgacgtaacggccaacgtccgcaccatccgcagcgtccccctcaccctcccccccggcgcgccgcccgtgctggaagtgcgcggggaagtcttcatgcccaatgaagcctttgccaaactgaatgaagaacgggacgccgacgggctccccgcattcgccaacccgcgcaacgccactgccggaaccctcaagcagctggacccccggcaggtggccgcccggccgctggccttcctggcccacggattgggcgcgtatgaaggcccggaactcagggacgcaaaagacttctggaacatgctccgccattgcggcatcccctgcaatgagccggtgtattacacggacagcctggaatccacccgccaggccgttcgggatattgacaggctccgccatacgctcccctacggcacggacggagccgttattaaaatcagctccacggctacgcgggaagcgctgggagctacggctcgcgcgccccgctgggcggcggcgtataaattccccccggagcagaaggaaaccaccctgctgaatattgtcgtgcaggtaggacgcaccggggtgctgacacctgtggcggaattgcagcctgtgctgctgtccggttctacggtagcgcgggccaccctccacaaccaggatgaaatcgaccggaaggacgttcgcataggcgatacggtgctggtggaaaaggcgggggaaatcatcccggccgttctgaaagtgaacctttccaaacgcccgcaggacgccaggccctacagcatcctggaagccacgaaagggctgtgccccgcctgcggcaaccccatcatgaaggaagaagggaaagtagcctggcgctgcaccaacttcacctgcccagcgcaggccgtcacgggtatcacccatttctgttcccggtccgctctggatgtggaaagcatcggctcttccgtggcggaagcgctgagaagctccggattggcgtcctccgcgctggaccttttctccctgatgccggaccagctcgccaacctgaacctgggcacgccggaagaaccgcgccgttacggggagaagaatgcccggaaagctctggacgccctgcaaaacgcgcgcgggcttcctctggagcgctggctcatcgccttcggcattcccctggtgggggaagttgtcgccaaggcgctggcggacacgcatcctgacctgaagcatgtggcggattcgccctacctccgggacatcgtccgcctggatgaactggtggaacaggccgccaaaaccaaccccaacacccgcgaaaacaaaaaggcggtgaaggaaggcgcgctttccgcagaggcggtacaggagcgccaccaggaactgatggaggaaatcgaccgcctgaccgctccctatctggcaacgggctacctgcgtaaaaacacggccaaattcagctatggctccgaaatcggcgtggcggcggccaaatccctccggagctttttcgcctccgcagcagggaaccataccatggacgtcctgcacggactgggcatcaatccccaatcccaatcttaccgggccagccttctcgaaatcccggcgggctccctgtccggcaaaaccttcgtcatcacaggaacgctcagccatccgcgggattactttgaacagcttatcgcctcccacgggggaaaagccaccggagccatctccaaatccacctcctgcctcctggcaggcagcggaggaggctccaagcgggacaaggccctcaaactgggcgtgcccgtcatttccgaggaagacttctacaaaatgatcgggaattaattgccgcaaaacagcggaaacgggaagcaggaactgaaacgcacgcatcatgcgcccggctacccgtatcttcgtattcccttcgcttttttccgtgcgccgttttccggaaatttcattcctgaatccagcaaaaaagcttgctacgggcagccatctgtcccctaataaaccggtatgctgaacctgcccaatgccattaccctgacgcgtattgccctggtagtcgtctttacggcagcagtcagcgtcgcggaccggtattcctggggatacctggctgcgctggtcacgttcattctggctgcctgcacggactggctggacggctacctggcccgccgcctgaatcaggtcaccaccttcggcaagctgattgaccccctggcggataaaatagccgtctccgccgccttcatttacctgacgggcgaagggctctgccccgcctggattaccattctcatcatcagcagggaattcctggtcaccggactgcgccagattgcgcaggatcatggcgtcatcatccctgcgggaacgtccggcaaatggaaaaccgccttccagctggccttctgcatcgcctgcctgctggccctgacatggacgcatacgccggaatacctgccttccatcacggaccggctggccgcgctctgcctgtggcacggttccggcgcttccaacttgctgtaccaggttacactgtgggggtccgtcatcctgaccgtttattccggagccgtttactgcgcgggcgcccgcaaattcctgcagcgttgaaaattgccttttcccccatccgtcaggagacagaggcaacattgttcattctccgggacatttcatataccgggcgcatgatttcattccgccgggttcctgtatgaaagaatgcacgcggaatcttccgctgtcgcccttcctgcacatgctgaagccttgaaacgttcaagctgtccatcctctcttccggaagatgaacgcctccacggctctcaagccgctttacctgtccttgacattgcgttccgcaaaaacatttaaaggatcatcatgtttgcccgaaggcttggcattaatataatgccccctcttttccacgccagcccacagcgtttccaaatccataagaaagccgttcctatcgtatctccccaaagcaacagctatgctgtacactgaattaaaaacaagcctgtcattatttctcggataagcaaaaacatctttagaccccctgtttttgggaactgtggcaaaaaacaggaatgagccttcttcggaatttctgattgttatttttccattttcatcaaccaaaatttttaaagtatagaaaattcctttcttcgtatcgtgagcacataaatgcagccatttctctctattcattctgtctatgacgaacctgccgtcatcagatgaattcacgcaagcttccaaccggtacaaataatcgttgctgtcttccgtataccaagcttcatagttttcagcattgcgctttttcttattaatcaaaataccgaattccaccatcttttccttattttttgcatacagagtatcttgctgtttaagtcggataagatctccttctatgacaaaatttattttctgatccacccattcccaacgaggttcattaccataggaaggagtaaataaatgttttcccgtaaaaagatttacgcgctcagaaattcgttttttcctaccgtgaacgctttttaaatatttcatattgaacaaaccatcttctttaataaaatctttcggatacccgaattcatgttttttcatttcttcataaagagcatcaatcagattctggtaatattccacaccttcttctccatcaaggcgtttttgtttcgcttcagcaagaaatccgacaaatggatgctccttgccattcctgccggaatccggaaagccagcttccccgctccggttttcctcccgcgtcaaatgctccaataaccgctgatcagcttctgaaagtttttccagtaaaatggtttttatttttccaccatttgcaagcaaccggattttgttgccatctcttccctcatacgctgcctttaattgatgacctgtcaccgccgtccaaatccggggtttactcaaatccatcccctcttccggctgaagccccgcaaaaagagggctgccgcaacatacggacaacacgacaagaaaaatgccaattccattctttacctttgttttaagggacataactaattcaacatcgtctattcaaaggaaagtatacggatgaggaatccgctgattgggacatgcggcctctaacatgtcagcaagctccctgatgcagataaaacctgtaccggaacaggaaaagagcctcttgggtattccccccctaaattgtccgccagaaatcaatcagtcattcatattcagaatttagggttgacggcggattcctcacccgcttcatccggtaatttattcatattcaatttctataaaaaaatcatgacaagaactgtttttgaagcggagatacggaacactaacaggacaaacgtttttattttccttgacaggagatctttgccgtgctctgataaagccgttcccgccgaatggtgtttggttgttgattgttgatagtcatttgcggttggcggaatacgggcgtctccgtattgatcttttcagtatcgctcctgcggacttttttgttccgttattgccgtgattccgtcagttcattgcagccgaggcgcattcacagacacatccacagacatggtatcaactacattcagggagcttggcttgtcggctcccattctccgccaactggagaatctggagtacaagacccccactcccatccaggaagcctgcatccccctgttgctgcagaacaaggacctgatggggctggcgcaaaccggaaccggaaaaacggccgcgttcgccctgccccttattcaacagctttcagaacgttccggaaagccgccgggccgccgggtaagggcgcttattctgagtcccacccgggaactggctgcgcaaattcatgaaaatatccgcgcctacgacagagggctgcatctgtccaccgccgtcattttcggaggcgtgggatatgcttcccagttcaaggaactggccggaggcctggatattctggtagccacgcccggcagactgatcgaccatctggaacgccggaccgtcagtctggacggcgtggaaaccctgattctggatgaggcggaccatatgctggatatgggattcgccccggccctgaaaaaaatcgtctccaaaatcccgaggaaacgccacacgcagatgttttccgccaccatgccggacaatatccggcaactggcccagaccctgcttcagaaaccggaaacggtgagagtctcccctccctcctccacggcggacagggtagaacagttcctttgcatggtcggctcccagtcggaaaaaaggctccttaccctggaactgctgaaacagcaggagctccctggccgcacgcttatctttacccggaccaggcatggagcagaccgcctggcctccttcctgtccggaaaggattatccggcttccgccattcacggggacaaaagccagggcaggcgcgaacgcatgctccgtgaattccgttccggggaaacgcctgtcctcgtcgccacggacatcgccgcccgcggcattgacgtaaaagacgtacggcttgtcatcaactatgatttgccggaagaaccggaggtctatgtgcaccgcatcggccgcacggcgcgtgccggagccgccgggcaagccatcgctctctgttccccggaggaaatcaggaaagccaggaacgtgcacaagctgttggaacgcctccttcccgtgcacgcttccagcgcctccgtcccggctgaattgcgcgcggtcccagaagcgcgcaggaaaagtagcagctccatgcaggaaaaacgttccgctccccgcaggaagccgcggaaagggtacggaaggaacggcagccgtgcggaagcatgattttaatcattcaaaaaacttttgaacggaattgaagtcaacgcggtctcacttgctgcaaacggttctcctaatcgttccagtcgggaagcttcaaccggagtttcaatcatgaaaataacctcgttcatcatcaggacactatgcgcgggcaccgtcggttccctcgcctgccaggccgccatgcaggcttacgcggatgacgttccctccaccttcgtggaaggaaattattccccggaagtagcccgctacgtgcagagcatcgcaggcgtggcgctggcctcgggcattcatgattatgacgaaaacgccaccagcagttatcaggttttggctcaggtccttaacagcggcaatgtaacggaattgccggaagatctgaaacgagccattggaatgctgatcggctacgtccccgacccgaatgaaatcatccagccgatcatgtccagaaaacagattgagaggatgagaaagatggcggaccgcatcaagaacctgatggaggaaaaatacggagtggacctggaagactgcacgaacatcatgaagcgcactctggccccgtccttcccggacatcctccgctcctgcggcatggaaggcacccagctgcccgccaccaccgctttccgccccaagctgggcaaggctctgaatgaagcctatgccaggcttgcggcgccaaaacttcccgccgccggcatggcgcaataaccggaccatctacggatgatcggggagatgatcccgattccacggcacgcggtcccctgccagggtcccctgaatagaagccgcaggaaacggaatgatcttccccgtcgccgggaacggaaacggcagccaagcgccgatggcaacaaacaacaccctccggatgtcctccgatgcagggccgatccttcggaacgcggagcggcgatacgctcgctcccctgttttattcccaagcaacggcatgcaacatcggcacaaccggatgatgcccttacaggccccgtccttcccgcgctgcggcaggactggggcttttttcatgtccgggattttcaaaaggcggcggcattccctcctgattctttccaggaatcagggatattccgtttttacagaggaatgcatttttttcaccatctgtgaaagaaagattctcaaacctcagtatctatggcaaactggggattcaaatcctttatataattaccatccatggataattcatcatcacgccgtcgtttccttcagaccctgggcctggccactggcgccctggctgccggttcctttgccaacgcccaggaagtagcccccctggctcccaagaaaatcaccattccggacccgaataatatcggccccatgaccacgtggcccccgcgcaagcccggcgccatctacatgggcggcttcagggctcccaagctggacaaggtgcgtgtggcctttgtcggcgtgggtgaacgcggttccatgcacgtgggccagatggccgttatagaaggtgcggaaattgtcggcatttgcgacctgtatgaagactgggccaagcgcagtgcggacgtcgtggaaaagaagacgggcaagcgcccccccattttcacgaaaggaccggaagactacaagcgcatgatgaaggaagtcaagccggacgccgtcatcgtctgccccagctgggaatggcactgccgtgttacctgcgacgtgatgaagatgggcgcccacgcctttgtggaagtgcctatggccgtctccatcaaggaactctgggaaatcgtggatacctccgaagaaaccaggaagcactgcatgatgatggaaaacgtcaactacggacgtgaggaactcatgtacctgaacatggtgcgccagggcgtcattggcgacctgctgtacggagaagccgcctacatccatgaactgcgcggacagatgaagcaggtggaacgcggtaccggttcctggagaacctatcactacgccaagcgcaacggcaacgtgtatcccacgcacggcctcggccccattgcccagtacatgaatctggcccgcaaggacgactgcttcggcaggctcgtctccttctccagcccggccctgggccgcgccgcgtatgccaagaaaaatttcccggcggaccacaagtggaacaagctggactttgcctgcggcgatatgaatacctccatcatcaagaccaccatgggccgcactgtcctggtggaatgggatgaaaccagtccgcgcccctactcccgcctgaatctcatccagggcaccctgggcaccctggtcggcttcccgacccgcgtagccggggaaaagctgggcaacggaaattatcatgaatggattgaaggcaaagaaaaactggcccccatttttgaaaagtacgatcacccgctctggaagagaatcgggccgctggccctgaagatgggcggtcacggcggcatggacttcgtgatgctcttccgcatcatcgaatgcctccgcaatggcgaaccgatggaccagaacgtttatgaaggagccttctggtcctccgtctccgagctttccgaatactccgtggcccagggcggcatgccccaggtgttcccggacttcacccgcggagactggaaaacgactgctccgctgggcatcgtccagtaacagcaagcaatcttccccggcccgaagcttttgcgcctccatggcgtgtttccgggccggggcaaaatgcctcctcttccaaaaacaggcccagcttgcaggcggcctgttttttattgctccaatgacaccctattccggaagttgaaaggctccgcaggcactccacttaccggggaaagctcccggatgacgccaaaaagcggaactccatgaaattttccttctgcgcggaaccgtatttaggcaagaaaaacatcctgcagaaaaacgccgttccccttacatcgcacacgccttcatgctttcctattgtaccaatattcatcccgcagaatcctgggcggaaaccagggaggctcttttcacctgcgttccccgcatcaggcaggaactcgcggcgatggactcccctctgaaggctctccccctgggcatcggcctgcgcctgtccgccagggcggcagcggagcttctggaaacgccgcacgccgcggaaaccctgaaatcatggctggaagaccagggcgcgcgcgtagaaacccttaacgggttcccttacggaaatttccacgggcagcgcgtgaaagaacgcgttttccagccggactggactacaccggaacgttttgaatacacctgcaacctgttccgcattctggcactcattggtgacgaacaggctgacaggctgaccgtcagcacgctccctgcctcgcacagctggtttcatgcggatgaagaacgcatcttctcccggctggacgccatgagcggattcctggatgtgctgggcaggcagaccggccgcctgatgcagctggggctggaaccggaacccttcggccattttcacgatacggatggagccatccgttttttcaacggccttcgcaaccgttcccgccgtcccgaacttatcgaacgccacctggggctgacatacgatacctgccatttcgccattctccgggaagaaccggaattcaccctctccgcctgggaggaaaacaacatcgccctctgcaaagtgcaattctccaacgccctggaatgccgcatatgcggggaggaagacctggaacgcctccggcagtttgacgacggcgtttatttccatcagaccagcattctccatcgggaaggcgccatgcttttcccggacctgcccaatgccctggcctatgggcgggattatgcagaggaaatacgggattcccaatggcgcattcattaccacattcccctgtacgcttcaccggaaccacccttgaaaagcacggaagaattcatccagaaaacgcacaatttcctccggggccgcaaaggcccgcaaccgcacctggaggtggaaacctatacctggagcgtcctgccggaccacatgaagatccccctggcagcccagattgcccgtgaactgcattatattgaaaccctgtaaagccatgatgccccgcatgcatccctccgccgtcctgtcttccggattcctgctgctgtccaccggtctttcctcctgcacatttcttcccatgttttcctccggagggcaggaaacgccgcggaccctgggcgcacgcatggaaaaacacacggaagtcctgcaaaaagacatcggggaaagaaacgccagccagcccaaatccatggacgccgccgccaaatacatcgccgggaatttctcggacatggggtacgccgtcaccatgcagcccgtatccggaggaaacgtgaaaaaaggaacggccatttacaacatcctggtttacaagcccggcctgtattccaacaatcaaagcatcgttgtgggagccaattatgattccagcggacggcgcaacaacggcagcggaacggccctgctgctggagacggcgagaggcctgaaagacatccccaccaatcacaatatctattttgtcgcatacgcgaacggagcggagcccgcagggaaatccatctcttccggagcctgcgtgcatgccagcaccctaagcggcagcattggagcaaccaacatcctgggcatgatcaatctggaaccccagaagctggatgccggaggggaacgaaaacagccgggcccggaatcctcccgggaagccgttctgttcacgaccaccccgcacggcaagaaatttgctggccagtgcgccgcccccttcgccaaatcctgggagcaggcgcccgctaccttccgccgggaaccttccgccctcacaggcaatgaccgccattacgcggtcctgggcattcccacggtctcctgccggagcaagtatcccgtcacggatgcccgtacggaagagtatgtgcaggcgctgacggacatgatccaccaggtagcggacaacgacgcgcccgaaccggcaaaaaacgccgaccagggcgagaaagcatcctgacgtttccctctctccccgttaccgggacagctttctccttccgtggccgccgcccagcatcagcacaggcatgaaggaaagggccaccagcgcaataaccataggcatccaattgtcggaatacctctgcatcaggaacgaagtcagggaagggccggccagcgtgcccagggaataactcaacagcagaagctggttcatggtcaccagttcatcccgggaagcttcctcgcatccccaggccatggcaacagggtacagggaaaatccggccagccccagagcaatcagggagggagccatcagcccccccttcagcatcagcccggcacaggccgccgccaccagcagggactggcatttcatgacgaaagcgcggccgtacctgtccgccagccgccccatgggccactgccccagaatggcagcggcaatcagcagggccatccagtatcccacggaagagtggtccattccctggtgcttcaggaacaggggcatcaggcaataaatagtacccaataccacgccggaaatcacacatcccacaacacccagaaagacgctgcggcgtctcagcagtgtccgaatttctatatgggaggaggatgaaacctgtccattgcccggctccagacgcgcgaacatcagcggaaccatgcccgccactgataaaatgcagacttccgtcacaatcaggggcatatcgctagggaaccagcccagaagcaactgccccagcaccgtacccagataatagaccaccatgtaggaagccagcagaatgccgcgggtttgcagcgttccggccctcagcagggcgctttccaccaccacccagaccagggcgcagctgatccccgccagcagccggaggccgctccaggccggaacgccgggaaacacaggcagcagaacggtggacactgcgcataaaaggcatgcatattggtaacttcctttgaacccggcccggcgaatcacgccgccagccagcagcgttccggccaggttcccgagaaaaaagaaagcccccaccagcccggcctcccaggtggcggcatcaaattgctccatccacaggggaacaaccgtattcaacacggcaaacgccactgtctggaaaagaagccccgccagcagcagggcaataggccaggtaaatgtacgcatcacgataaagcggggactatagcaccaaagccgcatcagtcaatcgcctcttccgtcggaaagaaaaacaaaaaaagcgtcccatcaacaaaaggcacaatacattgattgcaaaattgttaataaacaattcaaaatataggggattgtcatattccccggcgcagggaagcgggcagtatcttcatctgctcccgatatttggccaccgtcctgcgggcgatgttcacccctttttcccgcagcgcggccgccagcccggcgtcactgaggggtttggaagaatcttcctccgcaatcagccgccgcatcagctcctggacggcgcaagcagccacggctccggaagccgccccgtccggggaaacgccgccttcagacggaactcccgcactgaaaaaggatctcaattctttcatcccccacctgcacaacaggtacttgtcccggcacgcccgggaaaccgtggaaacatgaacccccatctcctccgccacttcttccatgcccatggccttcaggcgggccggacctgacctgaaaaaatcctcctgtctctgcacaatgacacgggccaggcgcaaaacggtctcctgcctcatatccaaagcccgcaacagctcctgtccctcctggaacgccctgcggagatattgcctcagctcccggcttccggacccctcagccattaactccatataccgttcattcatggacaggcgcggaagatactcggaagtgaggacaacctccagcacgccggaaggcccctcctccacaatgacgtcaggcagcagatgagggttgccgccgggggcgtaggccccccctggatcaggagtcaggctcctaatcacctccagagcctccgccacggctcccggttccacatccagcaggcgtgcggcttcctcatacttgtgcgccgccagttcccgccagcagcgcttgaccaggcggaaagcaagcgaacgcttcaaaccgcgctgttcaagctggatcagcagggaatcccttaaatccgccgcccccactccgggcgggtccatttccctcagcgcagccagagcttcctccatgtcccgcatgctgaaacacccctgctcttccagctcctgcggagactccgtcagaaacccgcgttcgtccaaagcgtcaatcagcaggaacagggcgtcccgggcgcggcccgtcaatgcggaatgctgcgcctgatccatcaaatgggttttcagagattccggagccacgacggattcatacatgaaatcacggcgggcggccgcgtccccagacaggcggccttccgccgtaaactcgttccacccgtcctcccgctcattccaggcatccccgtccggaccgtcttccagcgcttccggggaagcgtccggcaactcctcaagcatgggattggtttccagcgcctggcgtataatctgccttaattccaaagcggaagcctgaagaatctgcatccccgtctgcatggactgggaaacggccatctggcgcgtcattccatgctgcagggatacctcactcataccgcccacaagctacaccaccccccggaatctggcaagggggaacaccctgcagcaaaaaaggccaccattttcatgtggcgtttttggaaaacgttcatataataaatgcccatgaagattttgcacatacttgctttctccctgctggcctcccttctctcaacggctgcgccgtcccctctgactccgctgccacgggaacagccccaatggtggaggaagcaatatgaacagcaggtggaacaaataaagaacaacccctgcggcgtccttttcctgggagattccattacggactactggaaaagggaaggaaaaccaatatgggaaaaggcgttctccccctatcatccctgcaatttcggcatttccggggaccaaaccaccaacctgatttaccgcatcacggattccggcatcccggcccagacggaccccaaactctgcatcgtcatgatcggcaccaacaatacaggtcatttcaaaggaggggaagccccggaaaaaacggccatgggaattctgggtgccgttgaacacctgctggtcaggttcccggacacccacgtcctcctgctgggcattttcccgcgcggcacaggtccccaggacaagctgcgccagcacaacgaccgcatcaacgccattctggcccagtgcaagctgccccgcaccacttacgccaacatcaacaggcgctttctggactcctccggcaaactgctccccggcatcagcagggacaacctgcactttacggaaaaaggctacgccatctgggcggacgccgtgctgccctatatcaaaaaatactgcaaatagcattctttcccatcctcgacgcatgactggcggaatgcccccttccgccagtcatgcgtgcggttcgggaacatatttgtcaatcaatgatgaagcttacgcagcaacaactgtccagccttcattcttgaaactgcggtcatggagcctgaaaagcaccgctcatgtccatcaattcatttttcccggcggctccgccttgaatgcttatgagtaacgtccggactttgggtcgcccgctttaataaacggttaagatataaaagcagtacggtgcatggaaagtatttaccgccaagcccgcaaaaagctgcatggatgccagggcccgcgtctgaaaattttgcgcagaaccgaagttacagttgatttggaataaatatattataatgagacaatatatcatagacgcttttaccgacaaagtttttcatggaaatcccgcggcgatttgcattttagaacaatggccgtccgaggaattgatgttaaatatggccgttgaaaacaatctttcagaaacggcctttgctgtcaaaaaaggggagagctatcatctgcggtggttcacccccggtggagagattaacttatgcggtcatgcgacattagcctgtgcctatgttattttgaacttccatgaaaaagaagcggcaaaagttgtttttcaaactttaagcggtgatttggtggtagaacggcatggtgatctttatgaaatggatttccccgcctatgaattaaaatcagttcccgtaacggagcaaatgatcgacgctatcggcgctacccccagagaagcgtatatggggcgtgaccttttatgcgtgtttgacgatgtaaaaataatcgaacatctcaatccggatctatcaaaagttcatgccctgaacggtcttttgctccatgtaaccgcaaaaggtgtggaaactgactgcgtttcccgtacctttgcccccaaatgcggagtgccggaggatgccgtttgtggttccggtcattgtcacattataccttactgggcgaacagattgggaaaagacgacatcatagcttatcaggcttccaaacgcggtggaacactttattgccgcatggatggagcacgggtaaaattagcaggaaaagcagccttatattccattgccgaaacacaatcaagatgaagcgtcaataggttaagaacatatgccgggcgacggaaaaaacgtcgcgcgacataaattatacatgcccaatgacacaaacggcggttttgaataatcaaggacgccgttcttctattccctaaaaaataatgcaactatgctttcaaacatggcggtcaacgggaataactgccatgaagcacaaagcatgccgacaaattccgacgaggtctatatcaaaaaatacatccgccgcagaatatcatatctccaaacgtgaatcataccatgtagcaaaagtgaatattttttcaaacttccatccggtatgcttgtgtctttacaggtgtgtttttataggaaatacaacaaaaaatcatgaaacaaccaaacctctcgaccggaagcaggaatccagccgacccgcctgtgccgcatttggaatcaggaaaaagcgcaaggaacaaaaaaattgctttttcccggggatatcctagagtgcctctccgcaatgagcatgccgcttgccgacttgatcttcctggcttttgccctctccgtggacgctttcgtcgtggcgttctcctacggcctgctcattaagcaaaagcgtttgagcaacggaatcaagctctccctgtccaccggggccggtcaattcctgatgcccgtgctgggttttctgcttacaggctccgtgcaccggtatattgcggcctgggaccactggctgggcttcgccgtgttcaccttcctcggggtcaacgtcctccgcgaaggctggaatcaccgcaacgaagaagaggatatgccccacgtcaccagcctgacgcttcctacccttatggctgtgggaatcgccaccagcatcgacgcgctggtagcgggcgtcagcatttacctttcatccgcccagtgtggaaccgaccctaccctccacgcggtgcttctccccgccgccgccatcggcttcaccaccttcctgtgcacggcggcaggctttttcctgaccagacggctgcaccgctttccgacctttcatctggaagcgggagccgggctcatcctcatcggcctgggcgtcaaaatgctctgtgaccatttgtgctgaaatatgccgcgaaggatgataaaaacgtccttccggcatcgtaataagtcgaaaaacgcactggttccctcccacctctttctgctattatcaagtaatcccttccacatgaatatttcacatcttcttctctgcacttccctgctcgcggctcccgtctgcgcggcgcagggcctgacggaaactgaaacggaaacgccggcctcctccagccgcctgccggcgcccctggcacaaaaaattgcctccggagactttgatggcctgcagacggaactgcgctccaccctcctgaaggctggagaacaaacgaaatccgaacagaaactgctccagaacaagcagtaccgccatttgctggacattcacgaactcctgcgcgtcacgggaccggacaaggtgaaagccgttttctccaaaagcgcgcaagatgccgctttcatcaaaacctttctacaggacccggcgtggatggagctttaccttggagcaggcctgattccggaaaattcaccggaaggccttcaaatcctctccgacatctggaaagcggacggcaagagcccggatttccggaattaccaatccctggccaccgggctggcctctgtcttttccaccggccccatggcgggaaggctcaaaaccaactccgccaacagcaatccggtgcgccgctaccggattttcaaaaaactgcatcaggaaaacaaactgcatccgggattcatcaaactgcgcccatgggaaatgcgcttcgtcgtgggaagtccctgggacgataaatcctatgaatggagcaatgaacacgtcaacctcccctggcggcgatacacggccgcctgctgggccgctccctatacgggccacaatttctttggcgataccattcaggggccccttttctacgtgccgtggagggatcttaacacgaccgcggaaaacacgcagatcatcggcggcgtttgcggcggcctctcctatttcggcaccatggcggcccaggcccacggcatccccgcttatccggtaggacaaccgggccactgcgcgtacgcggtgcgcgtgaagcggggggaatggaaaggcggcttcggcggaccagacggaggcatgcacaaccatatcttcggctcccaggctccgacttcctacctgctgatggaaaatgtctttgctgacaacgataaggcggaccaggcctacctgtgggccgcccaggcccggctggacgaggcttccggcaacaaggacaaggccattcaggcatgggaggaagcgctcaggcaaacaccgctgcacccgttcttccgcacggagcttcaacgcctgctgatggaaaaggaaggcatgcaacctgtcgactggtacgtttacgccaaggacgccctttcccactatcagggcaacggctttgccgcattcgacatcctcaaggacgtgcagaataaattcctgatggatattccgcccgcggaccggattgcctggttccgggacctgcatgaagccatcgccaccactcccacatcatgggcggtgaaattccagcccgtgctggactcccaatctgccttcctggcaaatccgcaggaaaaagcggcctatctggaaacagtcctctccacccacctgaaaacgggggacggcaccaactttggccaggcgttggaatggggcgtgaaaaactttgtggaaaacggacaggcggacgtgttctccaacgcattcgccaaggtagcccagcaaacgggaaaaaccgggacctccgggaaagcccccgaccccaaaaagctgaaggaagcctacggcaaagccatctatgccacggaaacggcccgctccattccggccttccaggccttgagcaaagcggcggcctctttctccggcgccaatgcgacgaacaatacggtcaaggcgtccattccgcagggctggaaactggtgcccgcagacggcatggtccggtgctccaccacgagccagtgggacagcccctgggaccatatcaacctgctgcgtccctgcggcggagcccagcatacggataaggaagccaatccgaacgtcattgtagaactaaaaaacggagtgaacctggccgggctggtagtcaccaagcgcgacggcaatgaaaaccggatgaagaaaatggaggtctccacgtccacggacggagccacctggttccccctggccgccacggaaaacatgcccaaggaatgggtcatcaccgctccggaaggcaccaaagccaagtggatcaaggtggaagccaaaaacgcacagccggaattcatgcacctgcgccatatcctcgtttacgaaaaataaattctccattaacgccatgcttcatcacatcaatcccgtttccggcctgctggccgcagccctcttcctgtccacccctgtccaggcggccctccccgcttacagcgccgtgaaagacgaggcgaaaaccgtcaataaatacatgatcgtcgtatgggcaagcacggactggtccccaaaatcacgtgaaatcacccgcgctgtggaacacctggccaagaactccccggaacccgtgctctggtgtatccaggacgagcgtgaggaaatgacggaagaagagcagaaactgcccaagcccccgggagaaatctggaacatccccgccattcaggtggtctcccccaccggaaacatggtattcctgtcggaaggcgtctccagggaaacattgccagccgtcatgaagcaggcaatggaagccgtaaaacagcaaaacaaggccaatgccctgtgggaaaaagccgccgcttcatccggaacggccgcggcccttctttacggagaagggcttcagcagcttcctccttatgcggcctctgccagaaaggatattctggaaaaaatcaagaaggcggatccggaagacatcaagggagtgcacttcaaatacacgttcaggcatctgccctacatcgaaaaagtgcagagaatggtgaatgattccgccaaagacggcggtccaaaggattacaaaaccgcccatgcctatgtaaacaaacagctcaaaacccccggcctgactccccttcaaaaacaacaggtcatggcggccaggttctggctctaccgcaatgaggggaaaaaggaccaagcgctgaagaccctgacggacatcgccaggatatcccctaaaaccctcatgggaataggcgcccagaactactaccgctacctgacggaacccgtcaccctgaaaagtcctcacttcacaggctacgacctgcgtccggaactgacgcctacccgcgtcaacgtcagcagcatgcttgacggccccggaaactacaagatcaccttcaagatgaacagcggcggctgcaatatccgcaacccccgcttcatgaagggcaaccgcgtagtcagcgaactgcccaaggaccggcaagacaaaaacgggcgcgaattcaccctgcgcctctccggttccgaaaagccggacttggttttcgactgccagggccagggatggttcgatgcggactgcgacatcatcgtgaccaaggaatcctgattcctgcaagcaaacgaacaaaaccgccattcacaaccttcacgaaggcaggacattcccaaggaatttcctgccttttttccgatgggagaagaatttccagccagcgcccaagcggaagcatccctctctccctgcttcttgcctaccaaagccgaacaacattcccggcagcttcaaaggagcaatcagggaaaccttcttctcattcccgcgttttcaagggagaattaccccttcttcccgccttcccaggcgttctccgccagttgacggcggtattccatgcgttcccggatcctcagttccatcccgtttccggtgggggtgtaatacacgcggccttccgggaggtaggcctggggtacgtaatgttccggatagtcgtgggaatacagatattccagcctggcggcatccgctcctccggcggcagccagcttcttgcgcgttggcgtccgcaggtgttccggaactgccagcgtttttccattgcgcacgtcatccatggcggcattgatgcccacgtaggcggaattgctcttgggggccgtcgccaggtaaaccgcagcatgcgccagaggaatgcgtgcttccggcatgccgaccatttccgccgcacgcgccgcgtccaaagctacgcgcagggcgttggaatccgccagccctacatcctccgacgcggcgatgaccagccttcttcctataaagcggatatcctccccggcttccagcatcatccccagccaatacagggcagcgtccgggtcagagccgcgcatagatttgatgaaagcggaaatcgtatcgtaatgggaatcccccaggcgatcgtacctgatagccttgcgctggatggattcctccgctacggagatgtccacatgaatgacgccgtctttccccgcaggagtggacagaacagccacttccagagccgtgagcgccttcctggcgtctccgtccgctttggcggccaaatggttcagggcttccgcctccatatccacgcgggatgcgcccagcccgcgcacctcatccgccagggcgcgcttcagcagggcggccagctcctcctccggcaccggctccagcggaaaaacctgggagcgtgacaggaggggggagttaatcgcaaaataggggttttccgtggtcgctccgataaacctgaccgtacctttttccagatggggaagcagaacatcctgttgagccttgttgaaccggtgcagctcatccacgaaaagaacggttttccgcccgtgcatgctcatcctcatctgcgcctggactattttttcccggatgtccgctacattggattccacgccgttgagcatcatgaaatgggcattcgtcgtccgggcgatgacggcggccagagtagtctttccgcacccgggaggcccgtagaaaatcagggacgtaaaccggtccgtctcaattgcccgtctcagcagcttacccggagccagcagatgcttctgcccggccacttcatccagggtgcgcgggcgcatgcgcgcggccagcggcatggcggaagtgtccgccccgggctcaaagccttcccgcgcttccgcttcctgtaaactgaacaaatccatcggaaacactttacccggttgaaaggccggagaaaaggccaatccccggaatcctgaaagtttggcggaagcgataccgttcccccctcctcaggacggaaaatgcacctttatccaaacatggaccagcaggacagcatgaaaaccatgctgacaggagccaaaatgctgaacagcagccccgcaacagccaatcccctgcggttcacctcccagtaatgaagggaggcgatcagcatccagatgggaatcacaaccatgtggacgagacccaggagcccccagcccgccagcaccagcaaaaagagccatgactgcgagccgtccgcattattgctcggcatgacaaggccaaagaagcggtacacaagcaaaaagaagacgaatatggcaaaaggtatccatccccagcgggcttcctccttccggcgggccatggccaattcaaaacagggatctttaaacgcaggcaattgcttggcagaagaatctctgaataaatacatatcgctcgaagtctctattattactcctttcttccgtcaacaacattcaatgccagcccggattttttccgcagaaaattttcccctctaacaaatacggaatatcggcttccgcccattaccttattgtcaaaccaaaaggttttgaaaaattcatgaaacgctcttgattataaataattttcccctttttcggatacttgctcttcgtcttttcccatgataaaaaagtctttttgcatcatccgaatttcaacacccgttcaatttgtcatacacagccccagtttcccataaaaaagactgcctccgctacaggagcggaggcagtccgggggtaatataaaaccggaaattacagaaggttacctgcccagaatgcccttgaagtattccagcgtcgtcgccaggccttccggcaaagtatgcctgggctgccatccggcattgcggagcttgtccgcacaggcgcgggaatgcttgacgtctcccggacgttccggggcatgaagcaccttggaggaagacccggcagccttgatgatgttctgcgccagctcttcaatggtgatctggccgccgtaaccggcattgaacacgccggtgacttccgggtgttccgccacaaaggtaagggctcctacaatgtctttcacataaatgaaatcgcgcgtctgggagccgtccccatacacggtgatgtcttctcctttgacagctttttcaatgaaaatgggcacggccgcggcataggcgcccttggggtcctgccgggggccgaagacattgaagaagcgcacggctgccgtattgatttttccttccgcccggaacatgttgaggtagtattccccatccagcttggtaatggcatagggactcttgggttccgggtacatggtttccagtttgggcaccgtgggattgtctccgtaaatggcggcggaagacgccagcacgatttttttgactccggcggcggaagcttcctccagcacgttcagcaaaccgttgacgttgatgtcgatgcattcgctgatcttgctcatggattccggcacggagacgagcgcggccatgtggaaaatatagtccactccctgcaccgcctggcgcaccagctcccggtcgcagatggaaccttcgatgaacgtgtgcctgagcccttccaggttcttgagatagcccgtgcgcaggttgtccagcacacggatttcctccgccttatcctgatagtgttccacaatgtgggaaccgatgaatccggcgccgccggttacgagaatcttcatgtttttccgatgttggtagatattggttaatagcggtccacaatggccttcatttcatccatctgcgcctcaatggattctaccagggccatctgcgtgcggcagcggtccaggttgtgttccggacggtggattttaaaatacacgtcaccggacaggtagtccgtcaggaagcggatgccgcattccatcgtgagcaatttgccggagaacggcagcaggctcttttccagaggcgtcaggaaactcttggcggaactcaggtaaccctgaaccagagcttcaaacatgaacatgcgcatcgtgaccttggagacgtccttttcatcttctgcggcgggagacgtagccgtccggatcatgtcgccgaagtcgtaaatggcggaaccgggcatcgtggtatccaggtcaatcacgcaaatgccttctccggttacatcgtccagcatcacattgttcagcttggtatcattgtgcgtacagcgcaggggcaattccccggatttcaggtaatccaccaccagatggcagtccgactcacgggaaaggtaccagtctatttccttctgcacttccttcacgcgccccagggggtcggactggatggcctctttcagagccgccaggcgggaagtggtattgtggaaattgggaatggtctcaaacaggggctctccgggcaggtctgccgtaagcttctggaattcgccgaaggcgcgcgccgcttcctggcactgcttggtagtttcaatctggtcatacgtgcgtgcgcgttcaatgaacgggtacacgcgccagcagttgccgtccgaatccagggcgtacggcttgccgtccacggagggaaccagcgtgagagtgcggcggtaagcttccgggcactgttcctccttcaggcgcttcagggcgtggtccgtcacgcgctttacgttctccatcagagggatgggctgcttgaacacgttatggttcacgcgctggaggatgtagcggatgcgctgtcccgcctgatccacccagatgcagtaggtgtcattgatgtggccgctgccgtaggaataaccgtggacaaaatcgccgcggagatcgaacagggttgatacagccttgagatcgtgcatagggaaaaaggcttagttgagcttttcagggtatacgccctgctggataagtttgttgatgccttccacaaccatgggcttgtcccccggataggtcatgccgaaccaggaggaagaagtgggaagaacggcgcaatccgcccggtccgcatgaatcagggcgtccaccacggtgggaataaagcattcgctcttgggttcctggccgtgttctttcaggaagtcaatgaaatgatcctccgtcagttcaatgaaggagggggagaacagccagaaattcatggaaaccagttctgcaggatccaccggcaggcgttcgcccttcaggttgttgccgcgcactacgccgtcttcgtcagcctggattttcacgaattcctccacgccatccagaaggccgcccttgatggagcaaatgccgcggttcacgtccccgttgtcggagagggtgttcttcagcggatagccgatcatgccgtaatgggccttgccgggttcatccgtagtggaggtcaggaacttggcggcctgcacaaaagcgtccgcaccgtaaaagtcatccgcattcactacggcaaagggttccttcaccacgtggcgggcggcacgcagggcgtgggcggtgccccagggcttttcgcggccttccggcacggagaagccttccggcaggtcgtccagggactgaaaagcgtaatccacctcaatcttgccggcaaaacggctgccgaccttttccttgaaaatatcttcaaagtcacggcggataatgaataccacttttccgaaaccggcccggatggcatcataaacagagtagtcaagaactacttccccgttggggcccatcgggtcaagttgcttgagaccgccgtaacggctgcccatgccagctgctaaaacaagaagtgtaggcttcatcatacgcaggccattatgaccaagcctccccgtttggcaacaggaaaatgccggaaaaccggagaaatccgcccgttaaaaaacgtaagagcaccaaagccccagcactacttttttgaaatcgtcccgcccgtagccgcaataccaccccaggaaaggctccacccgcagaccgccggaaacggcccacagcgcccccgtgcgcaccatcagctctttcaagccgttcctccccagataatcgtgggcaaaacccagggaaaccgtattcaccatggcgacggattcgcacagcaggggctgccaggtaacgccccactgggaatatgcaccctcctgtccggaatcatacaggaaagaaccgcggaaagaccaggaaggggtgggattccacttaagggacaggcccggctccgccccgttcttcaggggacaggaatcgtaccactgcccgttgacaaaaagcccggccgtgcattcgtccgccagataatactggacttccccgtgtaaagtggcctgactgaaatggcggccctgccagttgcggatggcgaaaagttccccgctcaccgcccaggaatcagacagggaggctccgccggaaatctggccctccgtggaatcagcccccatcttttccccccggtggacatagtatgaacggtagccgccaagcatctccccgcccatgcggatgggggaacggccgtccacctccgtcaggggcggcggcccgtcataccccaggacggcctgcacggcacagcacaggatgatggaaaacagcctcatgaaagacttttaacacaattcgctgcgccgctccaacgccaaaacggtgcatgcacattctccgggcttggcaaaacgggaatctgcccttaccctctcgcgcatggttcatttcaccctgttcgggatacctgtttacatccgccccagcttctgggtggtgctggccattttcggcggcgccctcagcatcagcagtgtggaagatctcatttatccggccctgttcgtcattgccggcttcatcgccatcctgtcccatgaaatgggacacgcgctggtgggccgcaagctgggcggcggccagcagacgattgttctggaactcttcggcggcctgacaagcagccatggcatgcaactgacgcgcggagggcgggccctcatgattctggcaggccccatgatgaccctgctgctgggcatcatcagcctgtggttcacctggaacatcgtcgctcctgtcatgacctcttacaacctgaacttctgggacctggccatcagccccttcacagcagcgctcatctcccccaagctgtacattctctcctgcctcatcatgattggagaatggtggactatcctgaatctactgcccatctaccccctggacggcggccagctgatcgcccagtacatccgctcccccaggaaagtattcatgaccggcttcatcacggccatcctcatcggactgctcagtttccagcttttccacggctactttatccccatcttcatggccctcttcgcctacagcaattaccgggaatacaaaaacgcccccttttaatattattccgagtttccttcgcgggccccgcccgttctattcaacaaaccatccaatatgtctcagcaaaccgcaatcacccctacccgcgcccaggatttccccgagtggtaccagcaagtcatcaaggccgccgacatggcggaaaattccgaggtccgcggctgcatggtcatcaagccatggggctacgccatttgggaactcattcaaaaggacctggaccagcgcttcaaggacaccggccatacgaacgcctatttcccccttctgattcctatctcctatctggaaaaggaagcggagcatgccgaaggcttcgccacggaatgcgccgtagtcacccaccacaggctggaagcacaaaaggatgaagccaccggcaagacacgcatgattcccaccggggagcttacggaacccttcgtcatccggcccacctcggaaaccgtcatcggagcggctttcgcccgctggacctccagttaccgggacctgcccctcaaagtcaaccagtggtgcaacgtgatgcgctgggaaatgaggccccgaatcttcctgcgcacggcggaattcctgtggcaggaagggcatacggcccatgaaacccgcgaggaagccattgaggaaaccctcaccatgcacaaggtttatgaagaattccagcgggacgtgctcgccatccccaccattccaggggaaaagacggaggcagaacgcttccccggcgcggaacaaacctacacggtggaagccatggtgcaggaccgcaaggccatccaggcagggacctcccacttcctggggcagaatttctccaagtcccagaacatctgcttcgccggaagggacaacacccagcaattcgcatggacaagctcctggggcgtttccacccgcatgatcggagcgctcatcatgatgcactcagacgacgacggactcgtctgcccgccccgcgtcgctccccagcaaatcgtcatcattcccgtcacgcccaaggaagaaagccgccaggccattcttgaccactgcgaggaactggcgcgcaccctccgcgccaaaaccttccacggccagccgctgcgcgtgctggtggacaggcgcgacctgggcggcggcgccaagaaatgggaatgggtgaaaaaaggcgtgcccgtgcgtctggaaataggcccccgggacctggaaaaaggctccgtctgccttcagcggcgcgaccggcccgccaatgaaaaatccttcgtcccggaaacggaactgatcgataccgctgcggatattctccaaagcatccaggacaccctgcttcagcgggccattgccttccgggactcccatatccgccccgcctccactctgcgggaattggaagaaaacttttccggagagggagatgcagactggctccaggtgccgtgggacgggtctccggaagaagaagaagaactggctaaacggctgcgcatttccatccgctgcatcccgctcggcgagctgggccgcggcgagtaggcaccctgcatcctcaccggacgcatgacgaaacgccgtgttctctgggccagaagctactgaaccctgacaccccctttcaacgggattgttccaagacaggcaaaacgggccttttcggaacaatcccgttttttacgcctctccactttccccaaaaacggcatgaacaagaaacggagcggcataccccacagggcagaatccttccctctcctgccccatacgcaagcaacaacgcacacatgtcggcaaaacaggatttttctctaaaaaaatcttgccaaggcagaaaaaccttatatactcttggcacatggacgccgtaaggctccaatcgttccaagcggatgtagctcaggggtagagcgcaaccttgccaaggttgatgtcgtgggttcgaatcccatcatccgctccaactttttatagcaaaaggcccgcacaaatgttgatgatgtgcgggttttatattatggttcgtacagaaaaacctgccccccctattgcaacaccgttccaggaaacattttcatctgctctggtgaggcccaccgaacgaccctcctccatgcatttcatggaaatgttgtcgaaaggcggcctccgtcaacattgcagacgttgccggttatcacaggcgcatcctgtattattgcttaatgattcagtatttatcctccgggacacaggcggacttaatgatcaccgtatcaagaacctgacgccatctgtcatacgcggaatgatataacgcaaatcaggtttcctcatttaagcattcgaatattcgctgaagaatcagcgacagtttcattcctgccacgttctattctctcttgacggccagactgaccataagaagcgtatactgtcctgaacgattccccatggtatcacggcaaaaatccagacagccaagggtttaagagggagattttttcgcgccctttgtgaaaaaaatacgacctgacccttgacggtctggatagtcgaaacgaggcgaaacgcccgttgtttttagaaggtgaatatggtataattttttctatacagaacggcaaaatcaggattttacaacgaggtataggatggaaaatattccaaattataaaatatttagaaagattaaacctatccataaaggctggtcagatgataagaagtattatgtggaaacaaaagatggggagcgattgttacttcgcatatcagatatttcatcgtatgagaaaaaacagcaggagtttgacattatgaaaaaaatagcagctatcggaataaaaatgtcgctacctattgcttttggtgtatgcgaaaatgaaaaaagcgtgtatcagcttctttcttggtgtgacggtcaagaagcgaaagaggtgctttatcatcttaatgatgccgagcaatatgcgtttggtcaaaaagcggcaatcgtcttgaaacagatggaaacaatcgactacaagcctgtatccatggaatggtcaaaaatctatcaagtacgtttggagcgttacatagagctttatcgcaaatgtgggtacacatttgaaggtgacgaactgattatttcctatttgcagacacagcgatattgtattggggaacgccccacagcattaatgcacgaagatttccaaactgataacatggtaatatccccagatggcgaactctatatcatcgacttccagatgtgtggtgtggcagacccttatcttgttatgactggtgcaggagtaagcgccatgtacagcattccctttgctatgggacagatagatggttattttggcaagtctgtaccagaagatttttggggaaaatataactattatatgattgcagaaatgctttatgcttttacggtgggtgcaaatatggaaagagaacgagaagaaactcttcatatgtttgatgacgaagttgaaaaaatcaaacataacggctctcatattccagcgtggtataaaaagaaattttgaccgcatgaaatttaaatttgtcgggttgactaattctgccatattgccttaacacagcagcggcagacaggacaagttactcgccgctattctttttacacttcccatttctgagccttgcagggcgcggttccctctgttgccgccgcaaggtactgtcaacgctctttcgtatctgatcggcttcttttacctcgtttttaagggcagtatacctctggtacagcgttttcttcttggctgtcagttcgttgtattccaatttccatgcttctgtctggattatgtttctgctttttcttcgtcttgtcggtctgctgcatggcaaggctctttttcactaaggtctcaagcgcggtcaataactggctcatgcacgttttccgtaatgtgcctctggcttctgtctacatacctgattcagaggatattccgcttcaagtataaggtgatagggtattcatggctttaatttattgatgttgatatgatggtgcagcatgtcttgggaaattcccggaaagctggcggctgccagaaacctttccgggaaaagcaaatagaaaaaagtgcagtaggttatctcccccgataattcacggagtgtgatggcacaatgccggatattaaaaaatggatttttcatttcgcctgaatgattggcccccccgcgtcacaggcaaccattcggatatgttatgctgccgagcattcgggcctattcctctttgcagagcctccgaaacagttcggtttccaatcatgcaccagtattcgtgccgccagattcatatccccccgacatgagatacagaagagccgcagccatacagttacgccatatcgccacacttctgcttacattgatttaaaatatcttttcttcatgtcaaccagagatggctcctccttgatccaggaaacggcttgagcccgttaagacaaactccggcggttctatctgcatcatcccttcaacgaaaggttctcccgcctggtcgtccagataaggccggtgtcggcactttctttacgccgtcccaattctcaacccggaataaaccaatgaataatacgactcaaccaggggctgctccaacaggccccgcaacaaccaataacgctccggcggtaaaatccgtcctccgcatgggagtattcactctcgccatgatcaacgtttccgccattgtcagcctgcgcggcatgcctgcggaaagcacttacggactgagttccgttttttattacattttcgccgcggtattctttctggtgcctgtttccctggtcgccgcggagcttactaccggatggccccaaaagggcggcgtttaccgctgggtaggcgaggcattcgggaaaaaatgggggttcctggccatctggctgcaatggattgagagtaccatctggttccctaccgttctgacattcgccgccgtttccctggctttcatggggcccggacaaagatgggatgaagcgcttgccgccaataaatggtatgttctcatcgtggtgctgtgcgtgtactgggcggccaccctgcttaatctgcgcggcatgaagacttccgcaggcgtcaccaaatggggaaccatcatcggaaccattattcccggagccatcctgatcctgctgggcctgggctattgggctggcggcaacccgatcctgctggatatgagctgggacaagctggtgccggacatgagcaatttcaacaacctcgttctggcagccagcatcttcctgttttacgcggggatggaaatgtccgccgtgcatgtgaaggatgtgaataatcccggacgcaattatccgctggccattctgatttccgccatcattacggtgcttattttcgttctgggcacgctggccatcggcttcatcattcccaattcccagattaatctggtgcagagcctgctgattacttatgacagctatttcagcttcttcggcctcggctggatgaactggattctggcgcttgcgctggccgtcggcgttctggcccaggtaaccgcatgggtgggaggcccttcaaaaggcctgtaccaggtgggcctggtcagcaaccttccgcccgtcatgcagaagcggaacaagaacaacgtccagatgggcatcctttttatccaggggggaatcgtcaccctgctttccatcatgtttgtgatcatgccttccgtgcaatccgcctaccagattatttcccagctgaccatcattctgtacctcatcatgtacatgctgatgttcgcgtcaggcatttacctgcgctaccgggaaccgaatacgccccgtactttccgcattcccggcggcagaaccttcggcatgtggattgtcggagggctcggcttcctggccagcctggcggctttcctggtgagcttcatcccgcctaaccaaattaccgtaggcagcagtaccatgtacattctccttctggtggtgggcaccttcattttcgcgggtattccctttatcatccatgccatggccaaaccctcctggaaacggccggtggatcctgaagacgcctttgaacccttcggatgggagaaaaacaatgattcccattccgcagcaacccctagccattccatatcccatgagtaacattccttccaatgaacagatccggacggccctggataacgcatacgcctacgccaaaaccgtccagggaggcaaaaacgcctcgtacattcccgccctggcccaggtgccttccgacctgctggcgattgccgtggtcaccgtcaacggagacctgctgaccgcaggctccgcggacgcgcccttcgccattgaatccatttccaaggcattcaacctggcttatgtcatggatctgatcggcatgaagcagctgcgcgcgaaaatcggagcggaccccaccggggaacccttcaattccgtaatggccattgagctgcacggcggtaagcccctcaatcccctggtcaacgcaggggctatggcgacggtcagcctggtcaacggttcggattccgatgaaatatggggaaacatgatccataatttcaataacttcgccaacacggccctgaccgtgaaccaggagatttacaagtcggaaagcgctaccaaccagcacaaccgcggcattgcctggctgctggacagctacggctatttttacaatacgccgcccatgattgtggatttgtacacacgcatgtgttccctgaatatcaccgcttcccagctggccctgatgggcgcctgctacgccaacggcggggtcaatcccgtcagcaagaagcgtgtggtgaaagaggaaaacgttccccccattttggcggaaatgtgcatgtcaggcctttatgattccacaggggactggatgtacaaggccggccttccggccaagtccggcgtgggaggcggcctggtggccgtagctcccggcaagctggccatggcggctttttcgcctcccctggatcccgcagggaataccgttaaggggcaggcagcgcttcaatccatcatcagggaactgaatctaaaccttttccggagctgatccgggatgagaaggtaaacccgcggagccaaaatccgaaaggattcccgcgggtttactgtatcctgtccagccccccgaggcagaccgcagtttctcgactgcggatttcagccataaaaaacagccttccggaacagtatgctgaaaaacggatatatccggcggacaacggccgcatcgcctgcgccccggcagccgcaggcaatctttccccggcgccccgcatcagctcctgtttgaaaagttgcacagctgcatggctacgccgtcttccataacccggaagccgtgcttctcataaaaagcggcgtttctgctctcctccggcatgatttcaagatacaggtagtccctgtatttttccttaaccatttccaccatttttccagcaatccccctgccctgataggcgggatgcaccagaacataatgcatgtaggcaaccatctcgctatcgtccagcacccgcaccagccctgccaggcggtcaccgtcccaggccgtaacaacagtggacgaattcatgagagccttgaacagacgccccggatattgtccggaaatccagccaacggacaggaacaattcttgaacatcttccctggaaaatttcttctcttccgtaaaaacaatcattttttctttaattaattattgattatccgcctgagcgggaaacgcctttccctaggccggattgacaccctgtttcaaggttttatctgctcccactgccgcagtcaacaccgtcttgtccgagggttttacccatttcaaggacatggcggagcctgtgataagaatgcgcgccggaaacaggcaaccctttccccagtcagcagctcgtccgcccctgcctcttccacttccgggggacggaagagccgcgccaggaacacacatcttcttttcaggaaaacgatactcgaatacgggagacggcatttttcctggaaccgattccccaaaaacggaaaactccgggcccaggttcataacattgtgaaaaacctttctccatcatttgtttaaggacttgtcaccacgcttcttttccctagaatccccccggtatgcttgacgccctccaaaatgcctttttccagaccggggacacgctcacatcctggctgtccgctttcagcagctttctgtgggggtggcccctgctcatcatgctgctgggcacgcacctgtacctcaccgccatcctgcggtttccgcagcgttatctgcttaaggccctgaaattgtattttgtgaaagatcatacggacaagggagatatctccccattcagttccctgatggtggccctggcagccaacatcggcgccgggaatatcatcggcgtgggcgtggcgattgcagccggaggccccggcgccgtcttttggtgctggctgacgggagttctgggaatggcaacccgttattcggaaggattactcgccatcaaataccgggtggagaacaaggacggcaatatgagcggaggccccatgttcgtgctggaacgcggtctgaacagcaaatggctgggtacagcctttgccgtcttcacggccattgccgccttcggaatcggcaatctgacacaagggaacgcggcggcggaacagctccaccacgccttttccattcccttctggggaacagccgccgttctgacggcattgacggctctggtgatgctgggaggcatccagggcattgccagggtatgcgctttcttcgtgccgttcatggccgtcatctatatcatgggatgcctgtatatcctgaccgtacaggcagagtatattattcccgccatccggtatattctggactgcgccttcacgggagaagccgccgccgggggcgcagcaggagcggccgtcatggcggcaatgagaaccggtgtggcccggggcctcttttccaatgaggccggcctgggatccgcagccatcgcctccgccgcagcacagaaccgcaaccccgtcaggcaggcgctcatctcttccagcggccccttctgggataccgtcatcatctgcgccctgacgggaattgtgctgaccaccagcatcatcgcgcatccggacatttcctgcacggacggccccaggcttactacgctggcattcagcaaaattccttacataggctcccctctgctcacgctcagcctggttacgtttgtagtttccaccattctgggctggtcctactttggagaaaaagcgctggaatacctgggaggcatccggctgatcatgccttaccgcgtcatctgggtggcggcggtcttcatcggctgcgtctctaaaatagaactggtatggatttttgcagactgcgccaacggcctgatggccctgcccaacctcatttccctgctggcactttccggcgtgcttgtccagcaaacgcggtactacctctggcagcacaggctggacgattacgacgaatcccacataccggaaggaaaataacgatttttttaactcggattcaaataattcttgcctttcggcttccggtagtatttacttcgccgcgcagtccctgcaaacctaaaagtcgcgttcgtctagcggtccaggactcccgcctttcacgcgggcaacacgggttcgagtcccgtacgcgatgccagctttaccgccgcagcagttacgacaattccgcttttccccttttcagggaagcatattggaaaaacgtaatggctgcggtttttttttggcccagttttccggattcaggaaagcgcggcagaggcgccgaaagcggaatccccccctgcttttaaatgccggaacatgtcttacatcccccggatttggctttcagaaagccccgccatcttttaaaatcctttacacgcaaacgccatggattacacacctctcattgaaaaacgccgccagcgcctggaagaattggaaacagtcattgccgaaccggacttcttcaatgaccagaaaaaggcctcggaaatcatgagagagcaccgccgcctgaaggaactcatggaaacatgggattccctgaacgccacggaacaacagctggcggacaaccaggaactggccaagacggacgatccggaactggcggaactggccgccctggagattccagaactggaagccgccctggaaaaactgcggagcgacgtgcagtacagcctgctgccccgcgacacgacggaagaccgggacgccatcattgaaatccgcgccggaacgggcggggatgaagcctccctgtttgccggagacctgctgcggatgtaccagcgttttgcggaagaacgcggctggcgcttcgagcatctggaaagcagcccgtcggacgtgggcggattcaaggaagtcgtctgccgcattgccggggaagaagtgttccgcttcctgaaatatgaaggcggcgtgcaccgtgtgcagcgcgttcccgctacggaaacgcaggggcgcatccatacttccaccgccaccgtggccgtcatgccggaagcggaggaagtggacatagaaatccgcccggaagatctccgcatcgaagtatgccgttccggcggagccggaggccagcatgtgaacaaaacggaatccgccgttcagatatggcacatacccacgggcgtttatgtccggtgcgaggaagagcgcagccagatgaaaaaccgagaaaaaggcatgaaaatcctgcgcgccaagctctttgaagccaaaaaacgggaagaggcggaaaaatactccgccgcgcgccgcaatctcatcggctccggcggccgtgaagaaaagatacgcacatacaacttcccgcagaaccgtctgacagaccaccgcatcggctacacgtcccacaatctggacggtatcctgatggggcagctggaagacctgattatggccctccagcatgcggaaatgcaggaacgcctggcggaggccggaatgtcctaacttcctttttcctttcatgaaaactttactggaagtccttcaggcaagcacggattatctggcccgccaggggtgcgacgaggcacgcgccaccatgcagcatttgctggcccatgtcctgcactgcaaccgcacggctctttactcccagtttgacaggcccgtggaagaagcggagctagcacccctgcgcgaactgctgaaacgcagggcagcgggagaaccgctgcaacatctgctgggggtcacggaatttttccggagggatttcctgacggatgcccgcgccctgattccccgcccggaaaccgaggaactggtggaaatggtgttaaagaaaatcccgaaccatccggtacgcatcctggacatgggcacgggctccggcgttatcggcgtcacgctggcgctggaactcaaggagcgcgccggagaagtcgtgctggcggacatttccccgcaggctctggatctggccctggaaaatgccatgcggctgggagccagagtctccaccatccagacgaatctgttcgccaacattccccaggaaaaaacggatccgcatgcggaggatgccgattctgctccggtgggagaaaaaggggaaaacgggcggaacatgctctttgacgttatcgtggccaatctgccatacattgcagagggggaaaaacttgccccggaagtcatgaaagacccccatacagccctgttcggaggccctaaaggctgggaaatcattgaacgctttctggcccgcgcccgggattacctgaatgaagacggctttgtagccctggaaatcgggtacgaccaggcatccgtcgtaacgcaaatcatggatggatacggctacaattacattgaagttctgaaggacatgagcggcgtctcccgtttccccttcggctatcgttaatgttatcctccttttcactccatgcaggcggcgcgcattctggttgacggacaaagcgatctggtactggattacggtattcctccggaagcgggagacgtcaagccgggctgccgcgtacaggtgcccctgcgcaacagaacggctaccggaaccgtgcttacgctgtcagaaccggccccggcctggaaggacaggctcaagcccattctgaaactgatcgatccggagcccctgatttccccggtgatgatgaatctggcctcatgggcggcggactattactccgtggctctggatcagatgatccggtgtctgctcccggaaaccgttcgtcaggaaaatacggcggaaaaaatgcgcaaaatggtgtatctggaaaaaactccggcacgagaggaactggacgccctgtaccgcaaagcaccccggcaggcccaaatgctggattatttctcatccgcgaaacaacagtccgcccccctggcggcattcggcgccggagccctgaacgttgcccgcagcctggaagccaaaggcttcatttccctgaaagaagaggccgtgcaccgggaccccagcaccggggagcaattcgtccccacccagcccatgaagctgaacagccagcagcagaaagcgctggaagaaatcacggccatgtgcgcggcagagcgcaaaaaaccggtcctgctgcaaggggttaccggttccggcaagacggaggtttacttacaggccgtttcccaaatagtaaaatccggaaaatccgccctgatcatggtgccggaaatttccctgacgccccagacggttcagcgtttcaaatcccgtttcgcagaactgccttcctccgtggcagtgctgcacagcctcctctcggacggggagcgctttgacgaatggcatgccatccgttccggaaaagcccgcatcgtcatcggtccccgttccgccgtcttcgcccccctccaaaatctgggcctggtgattgtggatgaagaacacgacgcctcttacaaacaggaaagctccccccgctaccacgggcgggatctggccgtgctgcgcgcccatctggaaaattgcgccgtacttcttggctctgccactccctccctggaaagcatccataacgccctgacaggaaaatattccctggtaaaactgacggaaagggcggacggccagcagctcccgctcattcgcatcctggacatgaaaacggaaggaaggaacaaatccggtcccaacgttatctccgaacgcctcaggatgtccattgaccggcgtctcgacaagggggaacaggtcatcctgctgctcaacaggcgcggattcgcacgctccatccaatgcccggactgcggccacgtagtcacgtgcctgcactgctccctgcccctgacctaccaccgtacggaagaccgcctcatgtgccacctgtgcggattcaaagccctcccgccccgttcctgcccggaatgccggtccgccaacatcctgctccaggggtacggaacccagaaggtggaggaactcctgcgccgcactttccctgcggcgcgcatcacgcgcgtggatgcggacgtggcccggcgaaaaaacgccgtccggaccattctgaaccagtttcgcgcccataagatagatattctcctgggcacccaaatgatcgccaaaggtttggattttcccaacgtgacgctggtaggcgtactgaacgcggacctggggctccacatcccggatccccgtgcaggggaacgcactttccagctcctgacgcaggtagcgggccgcggcgccttaaacgcggagatctttccggagaagtcattatccagacttttacgccccagtccccctccctgcaatacgcccggcatcatgacacggacggctttgcagcccaggaactggaaatgcggcgtactttcgacctcccccccttcacccatatcgccgtattgaccatacgttcccagcatgaaagcatggcgggattcgccacgcaaaccctcgcggcccgcctgcgcggcatgcttccccctcccgccacgatgactgaacccatgcctgcccccatcccccgtgcgcacggacagttcagattccagattacggtcaaggggccatccgcccgcatcctctcccgcactctccggaaactggtgcaggaagccggcctgggggaagacctgacggctgtcattgatgtggatgccatgtcattcatgtaagccgccttgccaaaaccggccgggaacattagacttccggcacaacacaacttactattatgctgcttcacttctacaagatgacgggtgcaggcaacgactttgtcatggtggacaatcgtgacctgagcctttcctccgtgctggacaaagaaaccatagaagccctgtgtgaccgccgcttcggcattggggctgacgggttgatcgccgtagaaccctcccagggcaaggggggaattgttcgtatgcgttattacaatgcggacggcggagaggcggaaatgtgcggcaatggtgcccgctgcttcggcaactttgccgccgccctgcttcatcacgacaagacagccccccttccttttgaaaccatggtcggcgtcgtcaccgcaacctttgaaaaagacggcaatgtcaccgtaaacctgaccaatccccactccatgcagctcttcgtgctgaatgccgatccgactgtgggggcggatgtccattttctgaacacgggcgttccccatgccgttgcgtttctggacaagctggagggcctggacatttccaggctgggagcctatctgcgttaccatgaggccttttcacccaaaggcaccaatgccaacttcgccagaatcctgtctccggggcacattgccatacgtacttacgaacgcggcgtagaggatgaaacgcttgcctgcggaacgggaatgaccgcctgtgcgctgctgcatgccgtattgacggacgccccctcccccattcaggtggacgtggcgggcggagacacgcttaaagtcggattccaacgcacaggggaccgttttactgacgtcacgctgaccggaccggcagaccttgtgttcaccggagacattcagatctaaaccgcttcggcctgaaaagtcgaactccttcccatcagggaaattatctgttcaacagggaacattccgcccgcacataaccgccgtaattattgcagaacgccttgtacagggcagggcccatattcgtttcgcaatagtactttacggtaataaagccgttttcgcgttccatattaagaaaacggctggacagcagtaccagattgctctggtaattccacaaagccatgtcacgctccatttcctcatgaatcctgtcgcatataaagctctccggaggaggaaacagaatggcgctgacaacaccgatcagacagattcccggaatgacccctacggcaaaaaccccgtgacatttcctgatcaggggaaggtgattcctgaatttccggaaaatggtaaaacggaataaataacccgccagcagcgccaccgggaagaacacattcacgtactcaaaagccaggctcattcctccaagaacgaaaaaaccgatgcccttccacaccttccggtaaacaggaatgcaggcacaaagaaacacgtacagaagatatcccagcaggcaaaggaaaggcagaagcgttcccgtaaaaatatgctccaccatgcagtcccacggatattccctgctgggagcgaaggcttcatggaaaaacatgcatactatgctcaaaagcaccagcgcggcaaggaggatggtctttactttttttgactcgtacaaaagccacagcaaaacaactccgaacggcaataaatagcaacctatactgttgaatacagtggacaacatgggaatatgaggaaagaaattcatggagcggatacggataaatgagcggttaacaactaaaatgcagtagcggcttcagcaacagtaattggaaacaaaataaattcaaacactcgttttcaaataacccataaaaaatcatattcttttcacgaaaagccgttcagccgggctctcccacttgacaaaacaaccctctgaaaaggatagtaacgctcttgtgaaacactcccttttcatccaggccgtcctccttccggttctcttctgccttccccaatgcagccgcaaaccgctccttccggaatatacgcctctgtgttccggaatggtgccgggagaacacactgcccaccgggccctccgggcacgggaaaacagaatctaccgggtcggtccgaaaggcggcgtatattacatcaattcccataataaaaaagtttacatcaaatccaggagggtgcaatagaagaccacacggtttctccgtaattttccaaatgggaaacaaataaccgtcctatcatgtttttattgtataattgagaaaatattccgttcaaaaaacttattaaactcattttcttcttgccaaaatggaagaggacgggtaatgtctgccgcaccacaacactaaatggtgtcggtagttcaatggtagagccccagattgtgattctggttgttgcgggttcgagccccgtccgacaccccatcccctttccttcataaaaagagcacttatagtgctcttttttactatccccagccctttccgcatgcgtaatccagaattcgtcaaagccgctttttccgctattgccccgcgctatgtggctaccaaccatgtgctgagcatgggtgtggacctgctatggcgccagcgcgtcgttcagcttgtctccgaatggaaaccggaaaaccttctggatctggcgactggaacgggagacctggccctggccatcctgaacgcaatgccggaaatccgcctcaccgggtccgacttctgccagcccatgctggacatagcggccaggcggggactggatcatctggtttgcgcagacgccatgaacctgcccttcccctccgcctcctatgatgcggtcactgtcgcctttggcctgaggaacatggccagctatccggacgccctgcgggaaatgggccgtatgctgcgtccggggggccatctgctcattctggatttttccctgcctgaaagcctgttgaaaagcccttaccggttttatctgcaccgcatccttcccgtcatcgcagggtggatgaccggccaccgggaagcatacgactacctggcggacagcattgaagccttcccctgcgggcaggccatgaaggctctgctgcgggaatgcggctacagcaacatcacggcggaagctctgaacgggggaattgccagcatttacacagcccagcgatgagtgcgggggacgcaagagaaggcatcatacgcggcaaggcggcacgcgcccgcctgggcggaaaacttgccggactatccctgccccggcaaatcgccgtgattgctttctggccattcctggaacagctgctgagctttttcgtcacctcgtccgaccttttcatcgccactaaaataggggtggacgcccaggacaccatcaacatctctgacggcatgggcgccgtcgtcttcatcatgtggttcggcttcgtcatccaggggtctatcatgatgggagccacagccatcgtttcccgcatgacgggcgccagggactatccccaggcccagcatggcctgcaccaggccgccatgctggggctcctggcaggaaccatctcctgcggacttctcttcacatgcagcgatttcatggtcacgcacgtactgaccatgaatgaaaccgcccgggcctacgccctgcaatacgtttatatggccgcatttgcggccccgttcagcggcgtggtctttgccatcaatgccgccctgcgaggctccggagacacgcggcttcccttctggatcatgatgagcgtaggcatcctcaatgtcatcttcagcgtcatcttcgtctttgcggacgctcctctgggcggctggcgcatcggaggaattgcggcaggaacggtctgcggctacggcatcagcatgtgcatcctgctgttcatcatgctgcggcgcagaaaaaaaatcttcacgggcaggaaaaatgaatccctggaagaacttgtccgggaacggggagaacactatgccccgcccctgtacctcagcttttcccatctgcggccggacatgggcatgcagaagcgaatcctgaaaatcgggctgccgcaggccgtggaagtcttcggcatgtggggcatccagatgttctgcctttccatcatcagtgaactgcctgttaaaggcgtgctgggcgtccacaatattgccgtccgcattgaatcgctcagcttcctgcccggcttcgccatcggcatggccgcttccacgctcgtggggcaatacctgggcgcccggaacgcgcttatggcccgcatcaccatctggaaatgcatgcggtacgccgtcatcttcatgacaggcctgggagtgctcttcagtgcctttcccgccctgttcatggagatattttccaacggcagcacgaccctcattgataccggaatccccgtgttgcgcaccatgttggtggtggaacccttcttcgccgcctgcatcgtgatgaaaatgtccctgcgcggcgcgggagacacccggagagtcatgcttatttcctacggcattatgggctttttccgggtcgtctgcacctgggtatggttcaggctggcaccggaaaccatgactttgtggggcatctggctggttttcgcctttgaaatggccgttcaatccgccatcctctataaaatcgtcaaggggcggagctggacgaagctgcaagtctgaacctttctccggcctctcccgcctcccggcccattcgcaaatccaaaacgtttactgcaggataaaaactttgctttcctcctccaattctgctagcatcctttcacgttgttctgcaacgggctcgtagctcagcggttagagcaggggactcataatcccttggtcgtaggttcgaaccctaccgggcctaccagataaccccctgcaagtttttaacttgcagggggtttccttttccagtgcagaagaaaaaggctcctgttgaagacgcctctgcttcccctcctgcatatgacggagcttcaaagcggctgcaagcaaattccccggtcggcaagtccatgccgaacacatccccatacaaatacaacaaccatccggaaattctgtggggaatttccgggtagtggaaattcatgcttaaagggagtccacgagggctgccaaatcatcatcatatacgaacttgcattgatctccccgtttcttgaacagttcaaacaggtgcggcatgtccgtatccggaacggagaggcccagcgcactcaggcgcattttcacggcgtgccttccggaatgcttggtcaagggcagttccgtagcgccccagccgatttcctccgggtccatcacttcatacgtgctgcggtttttcagcacgccgtcctggtgaataccggaaccgtgggcaaaggcgttcgcccccactacggccttggaacgaggaacggccaggccgctcatggcggccaccatgcggctggtacgcaccagttcattcgttcgtactccggtccgcacttcggaaaagaaatcccgccgggaatgcagtgccataatgacttcctccaaggcggtatttccggcccgttccccgatgccattgatggttccctctatctgccgcgccccggcccggatggccgccagagagttggccacggccatccccatgtcatcatggcagtggacggacagccgaatgcggtccacattgggaacatgggatttcagataggaaatcaggcggaaatattcctccggcatcgtgaaccccaccgtatccggaatattgatgacggcagcgcccgcgtcaattacagactctacaatctccgccaggaattccggctccgtgcgggaagcgtcctctgcggaaaactgcacttccccgcacaaatcggaagccatggcaacggactttacggccatgttcctgatttgttcccggctttttcccagcttgtatttccggtggatgggggaggtggccaccaccagatggatgcgctcccgttccccggctgccttcaacgcttcatgggcggcggcgatgtccttttccacgcagcgggccagcccgcagacacggcttttttccgtgcgttccgccacggcccggacagctcggaaatcgccgtctgaaataacggggaagcccgcttcaataatatccacgcccagcgtttccagctgcatggccacctgtattttctgctccacgttcatcgccgcgccggggcactgttccccgtctctcagcgtcgtatcaaaaatatgtatttgttctttcatttacagtaaaaatgttaagaggtcgttccttcgggaactgcgcacggaaaacgttcctgttacggaatcattcctttggtgcaaatcaagacagccgtttacttccctcgcgccggaacggctcaccggcgcatatcaagatatcttcacggacttaccgtccgagaagcagcaatagacgaccttgcagaaacagggtattcatcttgcttgtttttactataaatccaccctgaatggggaacgggacagacaatgctctttaaaacctgctctgtcaagacacctcaaatacatatgacattgttagagttgtctcatccattaaaattttgaaagagagtgccttccttcacaaaaaaactgcctgttaaacaaggttataatgtacgaataaacatagaattccaataactggaactcattcctgaaatcagttccagatgagaaaattatgtaaccccaaactggataatacgcctaataacaatctattaagattaccataggataaggtttgacacattattcacaactcaacggcctattgctattcacagcaataggccgttttctacatttcccggtgggaacgtatttcctgaatggaaatggacagggaggcgcggccgcggtacacgttgcggtcaatcgtgaaagcgatatcccagggaggattgggaagctcccgttccgctccgttgaagaaaatagcgtcacgctccacgatgccctggcgcatgaaaagcttcagatgattggttcccacgcgcttgggcggttccgtgggaaaaacgtcggaactcatgaagagaggctgtggattggagttgccgaaaggttccagcttttcatagctgtccagcaaatccagcgtcaacgcctggaaggacacttccatgtctatgttgagcacggggctgcgctgttcctccgtcgtggtttcagacacataacggttgaatgcccggcggaaatcgtccatgcgggattcttcaatcaccagccccgccgccatgtcatggccgccgccggaaaccagcgtatccgcgcaatggtggatggcctgcaccagggacacgccgggaatggaacggccggagcccttccccacgccgctttcgtcaaaggcgatgacgaaggtcggcttgtggtaccgcctcatcagctgggaggctacaatgcccaccacgccgggatgccacgcgcgggaacccagcacaatgacgttgtccctctccgggtcaaaggagttatgaagcatttccaccgcatccgtccggatggcctcctcttcctcctgccgcttgcggttgtgggaatccagcatttgggcaagctgcacggccctcctggcatccatggtcagcaggagttccaacgcatccatgggggaatccatgcgcccggcggcattgatgcgcgggcctatcctgaaccccacgtgggcggcgttcaggaagcccgcgtggttgacggagtcggaaggtcggatgcccgctatttccgtcagggttttgaggcccgtatggcggctgtgcgccagcctgcccaggccgtggcgaaccagaatcctgttttccgccaccaagggaacaatgtccgccacggttgccacggccaccaggtccagataaagtttcaggtcaaaggttttcagtttccgctccttcaggagggcatgcgccagcttgaagactactcccgcgctgcacagataggtatatgggctgttttcctcaattttggcattgaccactgccgctgcatccggacgccccaaagggcccgcctcatggtggtccagaatgatgacgtctatccccaggctgttaagcatgtccacctccttcacggaggaagtgccgcagtccaccgtaataagcaggctgggagggtccgcacattcgcaaaggcagcgcttgatgccggcctcgctgagtccgtagccttcccgggaacggacgggaataaaatactggggatccaggtcataagccatcaaaatggcccggagaagcgccacggaggtgacaccgtccacatcatagtccccataaatgcacacggtttccccttcatccacggcccggaaaatgcggtccacggcagccctcatttcccccatcaggaaagggtcgctcaggtgggaaagcctggggtccagaaagagttccgtttccattcccccggtgaagccgcgctgcagcaggagctgcttgaccagcaggggcagttccgcaggaaacgctttcaagaccggatcatcctccttcacggaagggcgtagagtccaatgaaaacccggcgtcatggcagtattttagccccgcatccaacagggtcaaggttgtttccgcaacagacggccaaagcggagaaaagaagcgtccgcttccgtttccggaaacagtccgcacgccgcgcgcccggccctttcaaaaaaaactccgcccggttcgttccggacggagttcggcgtaaggcgccagcgcctgagacggttatttcctggaggaaaaaatcacttcattaatgattgcatccggctggggagccttgtaggtcaggcgcacggcggaagttccggcaggaatggcaaattcggagaccccgggaccggcgtttctcttgccgaccggcgtccaggcaccctcgccgcggcgcacctggatggcgaaggcggcggatcccactacgactaccttggaagccctggggttgtccagattgggaacgactacgtccaacggcttatcggcacggtaaaccgtcttcaggtttctgtcgctcagggagaccaggctggtgccaggatcagaaggaggaacgtcaaatttaaacatgttcagaacaatgtcctgttccttcccgcttttattgaccagtttcatgcctttgatccccttggggagctgatttcccctggcaatgaagttcttgccctgtttgtccagcttctggaccacgggtttggaggaaccttccacatccagcactacctcagcccaggagttgacgtcatcccgttccaggttgacttccagccaggtggcgtccgtggggccatccaaccgcagggaaataaattctccgggtttcatcttgtgcgtttccattacgcggttgattcgcacgattttgtcggatttctgcacggaaacgccctccagcccagccacgttggaggaagccatagcggaaggaggcgtgttgacggctatttccctcacggcagtccagacggcccgtccgttgcccgttttcttcggctcaatgacgcggtagcgcacggcacggagcaaaaccggcttgggagccttccaggctacctgcattccggcggtctccggccccagcggcttccaggtcttgaggtcgcgggagccttccagctgccctttctctacatagtcgccgtccttgtcgttgcggcccatcagcacttccacgctccgcacgggaatgggcattccgtagtccacgccataccagtctcccggctgaccataagcgccggagtgccagaaggagccgcggtccccgtcacagaagagttccgccttatccatgctgccccccttgaccagaggcttgggggaaagagccggagcagcggcaatggccgggaaaacttttttggagacaatatccgccagttcattgacggcgggggccatcacccgggaaccggtctttaccgcggaacggtacagctgcccttcctggttatggcggcgggaaattccatccatggccgccaaagcctgcgtggcctgcaccaggtgggtcgcggcctctccggcgttgttttcctccagcgccgccacggcatgctggccagcacgccccagttgttcaaaggcgtccacccacgcgccgatttccttcatcagccggggattgtcggccttggcgcggatgacaggcgcagcggaagccatgcgagcgaattcctttttaagcagagccgcatcagccttctctatcctgccttcccgggcggcttccagcacgcgcttgaccacaggttctatttccacggattcctcacgccggtaaccgtggccgttaggcccctggtcggagttgtggttcacaaaaacctgcatggcttccgccgccttcgggaacaggcgcctgactccctccttccaggattcctccgacttaaagccgttgatgttccaggagtagtccgcaagaccgaagagggaaaccttggaggcctccggcttatccatggggttggagacaaatccgcccatggattccctggcccccggttccgtggcaagtccgtacacgcggcccatgcacaggttggaacggcagtagtccgtaacggggaaattccaccagacgtaggaagggcgcttgattctcctgttcacccactgctggccttccagcgtgatgtcatggcagacggaattccccgtccacataacgtggatggaggggtccaggcggtcgcccagaatatccagataagttcccggcttgggattggcccagccgcggttgtactccgtagggcacatgaccaggggagtgacgtctttcttcaccttgacaaattcgtcattgatcttgttcagcagaagggcctgcatgtccccccgcttgccctctccgaagatgtcgtcaaaaaacacggcaaaagaacggacgcccagcttgtacatcatctcaaactttttgatgacgttgttcatgtcttcttccgtccacttaatgtctttgccggggtggatggcccagacaaagtccacatggttttccttcgccaccttcaccagttccctgatctgggcggcctggtccgcgggatagggatcccgccagtggggggaggaatggtagggatcgtccttcggcccgtagatgtatgtgttcattttgttctgcccgtaaaagcgcagctggctcagacgggcttcatggctccagggagtgccgtaaaaaccttccaccgttccgcggaattcaatgtccggccaatccgtaatttccccaacgggcaaaatcacgccttctccgccggtcttcgttcccagctgccgcagcgtctgcatggcgtaaaatgccccacgttcgtcatgggctcctatgcccacctttccctgcggagaaatcaccagcttgtaggctccggatttttccggaaccccgtccagcagcttgctcccgcccgccttggcggaacgtattgtcacggaaggcttcccggagaaagcaaccgtctgggaggtgaatttggactgctggggggacggatatacggcaggagtcgccgccagagcggagctagccagaaaggccgccacgctcaagccacattggagaagttgaaaaccattcatgatgatgcgcgataatggaaccagaaaaaactttccacctcaagaaaaaaccgtcctccgccatcaggggaagaacacgggaaaagacttcaagaagaaacttccccgccttccttccctcttcaggaagctcctcccgctccgcatggaatattcgggaactgtcatcactccatcacctggttcatccggagaccgcccggcgcagccgcctccctgcaggaagcggcatgttgatggaatttcctgtcaagggcaatcgtcccgcacggaaatcctggcggggctggatgccgggggagccgccttctcccttcttgaccaaaaattcaccgtaacgctgaaaaacaaaaaagggccgtgcagaatccctgaaaagtcagcgtcatcccatttcagaagacaaatttgaccattgcatcgcttgaagggaaggttcatcatgcggaacatgctccggcgcattttgattccttttctgtgtcttctgggcctgttctgctctcttcaggcccaggatgccccagtattgaaaatcgcggctctgcaccccgtcctgggagacatggcccgcgccatcggcggcagccgcgtgcaggtggcggacctgctgcgccccaacggcaacctgcacagctttgaacccgcgccgcaggacattgccgccgcaggacgggcgcgcctggtcctggcctccggcaaaaacctggagccgtaccttcccaaattaaaggacgccctgggaggaagcgcgcaaattctggatctcggagcctccgtcccggatgttcccgtggaggaagacaccgcagaccatgaccacgaacacgacggagactgctgcacccacggtcccaacgacccccactggtggcacacaccggccaatatgaaacgcgccgcccgcaccctggccgcaacgctcacgcggctggacccggcccatgaacaggactataaagccggcctgtcccggtggaacagaaagatggaccagctttcctcctgggccagaaaggaacttgcggacattccggaaacggaccgcgtcctggttacggggcatgcggccatgaaccatttctgcagggaattcggcttccgcagcatcagcatccaggggataagccgtgaagatgaaggcaactccgcccagctggcctccacgctgaaaaagctgaggtcagccggggtaaaagccctgttcccggaatattcctccaaccccaagagccttacggaaatcgccaaatccctgaacatccccgttgccagaccaatcaataccgacgggctggcccctgagggccacacgttcgaatccatgttcagacaaaacacaggcatcatcaaggaagccctttccccgtcccccaggccatgaccagcacacccctgcggcagttttttcccactctgggagtcgtcatcctgctgggattcttcctctacaacatgacggcacccaccaccggatcacaggaagcggagcattccgcccccacggcgcaaaccgcggatgttcccacggtcatcacggtcagatgcgcccaccgtccggaagccctttccatctcctgcggcggccgtcttctctggcagcccgaaacgcccgggctgcatgaagaaacggaatgcggcctgccgttgaaaaacggttccgtaacgcttaccgtttccgcccgctggccggaaaacacgccggacacccccgtcacgctggaactggaaccggaggagaaaaccaccgtctccgccacccgctggtccttcggcccctccctgaacgacagctactccttctcatggaaatgaacagcccagcccctccctgcacccaggaccacatctgctggggcgcgcacgccagccacccggaccgccaccgactgaaagtggacagcctcagcgtttattatggaagccttctcgcgctcaacggcatcagcttttccatcacctgcggccacacgctggctctgatgggtcccaacggtgcaggaaaatccacgctgatcaaggctctggccgggctgatccgccccgattccggaaaaatcctgtggaacggatgccccctgcacgacacgccgggagaaatagcctacctgccccagcgttccgacgtagactggtctttccccatcaccgtccgcgcgctggtggaaatgggccgctatccgtccctgggcctgtggaaaaaattcgggaggcatgaccgggatattgtggaaaaatcccttcacgttcttggtatggaatccctggcggaccgccagatttcagaactctccggcggccagcagcagcgggcctttctggctcgggccctggcgcaggaggcccatgtcctcctgctggacgaacccttcacgggcctggacgcccccgccagccaatccctggggaggcttctggattccctggcggcggaagggcggctggtcatcgcctcccaccacgacctgaacacggcggcggacatcttcgacaccatcctgctgatgaacagggagctagccgccttcggccccccgaaggaagtgcttacccccgcacgcatccgggagacatacggaatggaacctcaaccggaaatccaagcttcatgatggacgattttctccaattcctccacgaacccatcgctcagcggtccctgctggcctgcgtcatgattggcttcgccaacggtttcgtcagcgggctggttatcctgaaaaaatccgcccttcaaatcggcacgctctcctgtgccctgctgccgggcattgcggtggcggtgctcctcttcggccttacccgctggagtttgctgacgggggcggtggtggccgccctgctggtgggcctggggtccctcttcgtttcccgcacatcccggctgaaccaggatacagccctctccatcctgcataccacggccttcgctgcgggcttcatcgtgctggtaaggctgggcctgcaacagaaaattgacgactggctgttcggctccatcatgagcctgtccgactccgacctgtggatcgccttcgccatcagctccgtcagcgtcctgatcctgctgctcttccgccgccccatcctggtctgcctttttgacccggacatcgccactacgctgggaatcccctcccgcctcatcagttacggcatcttcaccctgatcattctggtgctcgtttcctctctgcaggccgtgggagcgttcctgacgctggggctgcttgtcggtcccgccgccacggtgtacctgcttaccaacaagccgtcccatctcttctgggggggaggaatcatcggaggactgggctccctgctggctttttacctgtccttccccctgggctggcatctgggtgcaaccatcattctggtgctgggcattattttttgcacagcctatttgtattcatcacggtgcgggcttttaaaacagcacggaaagaattcgtccaaagtacaataacaaagcccgttttcatgacaatccatgacacgcagactactagtccgccacagggagcgccattataatgcgggttgtgaaaaaatgtgagatatgctctgcaccggcaacggtgttcctgacacagatcatcaacgggaagtccaccaaattctgcctttgcgccaaatgcgcccaggagcggggtctgctggacccggatgcctttgatctggcggagaaactgttcccgaaccttcagggccaattcggcaaggaaggcgcggcggggcccgccgctcccattccggccctgcaatccctgcccctcacaagctgtccgatctgctccttcacccttcaggattacaaaaacgtaggacgcctgggctgcagtgaatgctacaacgtctttgaagaagaaatcctccctcttcttacccagatccagcctgattcccaccatcacgggaaaacgccggaacgggccgaaaaacgcgaaacggaaacccataccatcagcgatctggaacaacagctttccctggcagtggcaagagaggattatgaacgcgccgccaaactccgcgatcaaatcaaacaattgcgcacgccgaccaattaacatacatgctctttgacgacttactcaacaaccccgccaaatggatggtggaatcaagggatgagcacgacatcgtcctcacctcccgcatccgcctggcacgcaacctgaccgccaccccctttcccggctgggccacacgccagcagagggaggaaacgctgaagctcacttccggagaagcgcgccaaatccccgtcatgaagggaggctattatgcggagctctccggacttacccagcagcagaaacagttgctggtggaacgccacctcatttcccgggaactggcggcgcgttcggaaggctgcgccgtcctcatctcccgcagccagaatgccagcatcctctttaatgaggaggaccatctgcgcctgcagtatatcctgcccggcatccagcttaaaaaagcatggggggccatctccaaaatagactccgaactggaggccaggctcccatacgcctacaatacgcagctgggctacattaccgcctgtcccaccaacctgggcacgggcatgagggcctccgtgatgatgcatctgccgggcctcgtcatctccgaacagatgcagcaggtcgttcaggcggccgcgcagctcaacattatcgtccgcggcctttacggggaagggacggaagccaccggtaaccttttccagatatccaaccagtccacgctgggggacagtgaagaccagattgtggaacgcatgacccgcttcacctccgacctggcccatcaggaatggaacgcacgcaggcggctgctccagtcatcttccctgcaggtgaaggaccgcgtttcccgcgcctacggccttctgaccaacgccactctgctttccacgcaggaggcgctggccctgctctccttcctccggatgggagcgtctctggacatcttttcccaccaggcattaaaaaacgtcaataaaaccatcatgaacatccagccagcccatctggcccgcctgtccaccacggaccaaaccactccggaacacagggaccagatccgcgctgatattattcggaaagaactttccggcaactaatgcaaccatacaaatttttttgaccatccatgaataattttacgcctagggcgcaacaagtgctggcgcatgcgcgccgggaagcggaccgcttcaatcatcattacataggaaccgaacaccttctgctcggcctgctcaagctgggcaagggcgtggccgtcaccatcctggaaaatctgggcgtggagcttaccgccgtgcgcaaacaggtggaggaacaaataggccggggcacggaaccccaggcggagggcaacatcccgtacacccccagggtgcgcaaagtcctggcaatggcaaacagggaagcccaggaactcaaccacacgtatgtgggcacggaacacctgctcctgggcctcatccgtgacggcgacggcgtggccggacagattctgcgccacttcggcgtggatttggaacaggcgcggcgcgaactgctggacgtgctgacccccaaataccagatggatgcggatgaagacaacatcatcccggacgacgatgacgacgaggaggaaaatgaatcccccgccatcccgacggacgagccttcctccccctcctactccaggcagcagaaatccaagacccccgcgctccaggcctttggccgggacatgacccagctggcccgggacggcaagctggatcccgtcatcggccgcgcctcggaaattgagcgcgtcatccagattctgtgccggaggaacaaaaacaaccccgtcctgctcggtgaagccggggtgggcaaaaccgccatcgtggaagggctggcccaggaaatagcccagggccatgttccggagctcctgcgcagcaagagggtcatctccctggacctggcgctgatggtggccggcaccaaataccgcggccagtttgaggaacggctcaaggccgtaatggatgaaatacgccgggaaggcaatgtcatccttttcattgatgaactgcacaccattgtaggcgctagctccgcggaaggctccatggacgcctccaacatcatcaagcccgccctctcccggggtgagctccaggccataggcgccaccacgctcaacgaatacaggaaacacattgagaaggacgccgccctggaacgccgcttccagcaggtgcaggtaggggaaccctccgtggaggacaccatccagattcttgctagcatccagcccaagtatgaggaacatcacaaggtgcattatacgaaggaagccgttgaagccgcagccaagctctcccaccgctatttgacgggccggttcctgccggacaaggccattgacatcctggatgaagcgggcgcgcgcaagcgcgtctcccagatgacccgcccggaccacatcagcaacatggaaatccgcattgcggaaatcaaggaacgcaaggacaaggctgtggaaacccagctttttgaagaagcagcccgcctgcgcgacgaggaaaaacaagccaaggcggaacttcagaacatgctggaaacctggcgcaactcctatgagaccaactacgttcccgtgacggatgaagacgtgatgagcgtactcgccaaatggacgggcatcccgctggcccggatggaggaaaaggaaaccaccaagcttctgcggatggaggaagagttgaaaagcaaagtcatcggccaggacgaggcggcttccgccatcgcccgcgctctgcggcgcagccgtgcggatatcaaggatccgcgccgcccgatcggctcattcctcttcctgggccccaccggcgtgggcaaaacctatctggcccgcaatctggcggaaatcatgttcggtacctcggacgccctgattcaggtggacatgagcgagtacatggaaaaacacaccacgtcccgtctcatcggttctcctcccggctacgtaggccatgacgaaggcggacagctcacggaagccgtccggcgcaggccctactccgtcatcctctttgatgaagtggaaaaggcccatccggacgtcatgaacctgcttctccagattttggaagaaggcagcgtaacagactcgctgggacgcaagatcaacttccgcaacaccatcatcatcctgacctccaatgtgggggccgcttccgccaaacggcagagcaccatgggcttcggcgccatggccgccgacaacgcggactacgccgccatgaaggaaaagattctggaagcggcgcgcaagcaattccggccggaattcctgaaccgcttcgatgacatttctgtcttccgcatgctggaacgggacgacctggaacgcatcgtgcatctggaagcggacaagctcatctcccgtctcaagaccaagaatatcacgcttgccctgagccaggaagctctgagcctgatcatcaagaacggctatgacccgcagtacggcgcccgcccgatgcgccgcgccatcgaacgcctgctggaagacccgctggcggaatccctgctgaggggagacgtgaaacccggcgataaaattgaagccgtggaaacggacgggacggagacgctcaccttcctgcacatcaaggacaaaaaaccagccaggcccaaagcgccgcgcaagagaacgccgcggaaacccaaggcggaataaacgctttccggcttttcaaccagggcccctgcatgtcaacatgcaggggccttttcattgggccggattccgcggaactgccatttccatcccctgaaaggacaatgaccctccccgcgtatttacgggcatggtctcctcctttcccagaattctgatctttctgatgattgcaagcctgcatgtattcgcggaagacatgcagaaaaacagggaacgggaagccgcccgcgcagtcatcatacggactgtgccgtctctggccgcctccccggaaaaactgcacctggaaaccattgaaaaagaagacggatatgatgttttcgagacgaaagcctccgaaggagtgctgacgatccggggaagcagcggcacagccctttgccggggattctatgattttctgaaaacgaaccgtctgggaatggtatcctgggaaaacaaggacattcgctggcaagcacagctaccggacaccacgccgcgccgcatcgtttctcctttccgcaaccactattatttcaatgtggtcacctatggatacacgatgccctactggacctgggaacgctgggaaaaggaaatagactggatggctctgcacggcatcaacatgcccctggctctggttgccacggaggggatcgccgtccgggtctggaagcaactggggctgacggaaaaagaaatagaagaattttacacggggccggcccatcttccctggcagcggatgggaaacatcgtcaatcatgacggcacccttcccgccagctggcacaaggaacaaatcgccctgcagcaccgcattctccacaggatgaaatccctgggcatgtcccccatctgccccgctttttccggtttcgttccccggggaatcctccgcctttatccggaagcgaagcttcaccggctgggctggggaggctggccccaaaaaaaccatgcccattttctttctccggaagagcctctgttcctcaaaatagggcgcctgtacatgcaggaatggcagaaggaattcgggaaaaacacctattttctcgcagactccttcaatgaaatggaactccctgcaaacaaaagaggcattgaagcccgcaacagcatgctcagctcccttggagaacaaatctaccgctccatttcctccgacaatccggacgcggtatgggtgatgcagggctggatgttcggataccagcgcaacatctggaacgcagatactctgaaggccttgctcagcagggttccggacgataaaatgctccttctggacctggcggcggattacaacaaaaccttctggcgcaacggcatgaactgggacgttttcaaggggtttttcaataaaccgtgggtttacagcgtggttcccaacatgggcggcaaatgcgccatgaccggagtaatggatttttacgccaacggccacctggaagccttgaactctccggccagggggcgtctttcaggaatgggcatggccccggaaggaatagaaaataacgatgtgatctacgaactgatcacggatgccgcatggaggaaccgccaggaaaacgtggaacaatatctggaaaattattgccgggccagatacggaaattatccggataccctgaaggaagcctggaggctgttccgctgtacggcttactccaacctaaaagatcatccccgtttcaactggcaaatgaaacccggcacccgaaactgttccgttgacacaagtgaagactttctccggggactctccctgttcgtcaacacccgcggcctggaacaatcccccctgttccgccaggatgccgttgagatggcagcccattatcttggcatacgcatgaatgaagccatccgggccgcccaggaagctctggacgaacaggatcaggaaaacgcggaaaaatgcatggcctatttccgcaaatacgcccttctggcagattcccttctggaagggcaccccacatggaggctgtcgcgctggatatcgtttgcccggtctcacggaacttctccggaggaaaaagacgaatatgaaaaaaacgccagacggctggtgaccaggtgggggcctcccatagacgactacgccgccagaatatggagcggccttattcgggactattacctgccgcgctgggaacatttcatgcaaagctggctttccggcaaaaatccggatatgggtgcatgggaggaaaaatgggtccgttccactggcgtaagcgccgcacatgcgccagaggatttgcttcaagcctgccgccaggccgtccgggaggcgccccctcttccttcttccctgaaaagaaaagcaggcggatcaattataggaacctggacgtccgcgacggtagccgcagaatggagttacctggagtggcccgtttcttccgccgatcttgaaaaactccgcggagtacggttcattttcacttccggaaaccatgctctggaaatagaaggcgtcgaactcctggaaaacggcaaagtgatcgcccgcgaccagcatgccggattggcaggcaagccttcccatggaaatttctatcagctttcccttcccaaggggactcatgccaacaacggatgctccctcagagccagggtccgctccatgggaggaaaatcttccaatgggaaattggaactggttaaagaatgaacagcttcaatctcatttgcttacggcttattcctcattgattccgtgccttttacgttagaaaactccgccgtccgaatcaggaggcggcatggccggcgcctcccggaatccccgttcggcccaaccgggccgaaagctacatttcaaaccggtgcaggttttccacatgggaataacccatcttcctgagcgcttccagcgccttgtccgctctctttcccgtacggcaatacagcataatcacggcgttcttatcaggaagaagccggggggccagttgttccacctcatctgccggaatattcaaggcgccctccttatgtcccgtgcggtactcatccagagtccggacatccaccagcacaacaggacgcgcggcggcgccttccggagacacaaccatggcggaggaagcagggtcacgttccgcattcctgcctttcagccaaacgaagagggccgtcagcccggtcaccatgaccacgtacaaaaccacatttttcacgcggccacttcactaaaccgcggcgaagtaatcaagagaaaacaacgccctgcccacatgcgcaggcgtcatttgccgcccacgcagcaccggcggctccgttccacgggaaaacaatgcgccggatacagaagaaatacgcagaagcgggaagggacagagctttcccttccccccctccacattcaacaaggccggagaaccattcccctacccctcatcatcaatcaccacagcctgggaagcgaagccaaaagcggggcttccccattccaccacatccccgggtttcaaatataccggaggcttcatccccatccccacgcctcccggagtgccagtggaaaccacatctccgggccataaagtcatgaaccgggaaacataggcaatcagacgcggaacaggccagatcaagccgtccgtattgccgctctggcgcacttccccgttcactttcaattccagaggaatgccggagccgtccccaagttcatcagcggaaatgaacgtgggccccatcggggcaaagctgtcatagctcttccccttggtccactgcccgccatgttccagctggttggccctttccgaatagtcgcacatcagggtatagccgctgatagcccttgcggcctcctccggggaagcgtttttcagcacatccttaatcacgacggccaattcaatctcataatccagcttgtcgcagccgggcggatacaaaacaacatcactgcaggaagtaatggcggaaggcgacttcagaaaaacagccggttcctgcacggaatccccgtcaaactccttcgcatggtctgcataactttttcccaggcacaccagcttggaaggggaacagggcagcgcggtatcaatcatccattcagggttgacagctttggcggcggcactatccagaaacgcggcaatgcgcttcatttcctctccgcaggaacccgtttctccgcaaatgcaggcatcagcctcggcaagcacggagtccgccgccaggtattccccgcggctttcgctccacagagccatgatgcgctccgcctggtcattcaggtaaaatctgatcttcacccttccatcctacaaagctcctccttttaagcaaagagcggttccgtcattcttctctccggcgggccctcttccgccgcccagacgctctgtgaaagcatgcagcgcgtagggcttgcgttaccggagcaaaacattatcatgccactgcttaacatcattaacctatgtccgatcaaatctacttttttgacactaccctgcgcgatggagaacaatgccccggagcatccatgaacctacgcgaaaagctggaagtggcgcgtcaaatggaacggctgggcatggacgtgattgaagccagctttccctgcatctccgacggcgactttgaagccgtgcacaccatcgcccgcgaaatcaaaaaatgccgcatcgccgggctggcccgctgcgtaaaggcggacattgaagcggcggccaaagccctggaacccgccggggaacgtgcccgcatccacattttcctggccaccagcaagctgcacatgcagttcaaactgaaaaaagcggaatccgaaatcctgcgcatggccgcggaaggcgtatcctatgccaaacaatttgtccaggacgtggaattttccccggaggacgcttcccgcacagacctggacttcctgaccaaagtcgtggaaacagtcatcgacgccagcgccactaccgtcaacattccggataccgtgggctacaccacaccggacgagttctaccgcatcatccgccacctgaaggaaaatgtgccgaacatcggcaaagccgtcatctccgtgcattgccacaatgaccttggcctggccgtagccaactccctggcagccgtccgcgccggagcccgccaggtggaaggaaccattaacggcatcggcgaacgcgccggaaacgtggctctggaagaggtcatcatggccctgcgcacccgcgccggacaattcggagacgtcacggacaacatcaacacgaaggaaatcgtccgcacttcccgcatcgtggcccgcatgagcggcatgcaggtgcagcggtccaaagccatcgtgggggaaaacgctttcgcccactcttcaggcatccaccagcacggcatcctcaactgccgggaaacctatgaagtcatggacccgcaggcggtcggctggggagccacggaactcccgctcaccaagcattccggacgagctgccgtcaaatccaggctggaacagctgggccatgtccttacggaagaggaagtcaacaccgtctttgaacgcttcaagaaagtgggcgactccaaaaaattcgtttatgatgatgatctttccgccattgtggacgactccctgcatgcctccaccggcctatgggaactggacttcctgcaattcgtggcaggcagccacgcgcggcccacggctacggtgggactgatcaaggaaggcaagaaatttgaagacagctccacgggcaatggcgccgtggacgccgttatcaaagccattgagcgcatcaccaggcgcaaaggcacgctgaaaggttacagcgtcaacgccgcttccgaagggaaggacgctctgggagaagtaacagtgcatgtggacttcggccagcccaagcccattgtgggcaagggagcctccacagacgtcattgaagcttccgcccgggcctacctgaacgcggtcaaccgttctatccgcatggaaaacatgccccagcccaataatctggatgcaggaaccatctaacacgggaagcgccccgtttgcccgaacggggcgcaactccgcccatcagcctgccagcctctgcggggcttgcttttccattgctcccatgtcataaggttcaagactcttacaccaccccatgaaagcgacattactccttctttgcctggcgtgcagtgcgctggccgcaccgccgacaaaaaaacagccagcccccgttgaaccgctgcccgccctggaaaaaaacaccattgccattgacggccatccggaaagcgttgcagcggatgccgagggcaatatctatttcacctgcatcggctccaggctcacgcctacggaaaaagacaaggacggctacctgggcgtcattccgcacggttccactgagccgaaaaaaatcacggacgtagataccctggacgcgccgaaggggttgctgtatcaggacggcttcctttactgcacggacgtggacatggtattcaaaataaacgccaagaccggcgctattgaaggatacgtggacttgtccccatcccgcatgaaattcctcaatgacctggcgttcatcaatggcaggctcatggtttcctccatggataccaaccagctcttctatgtggacacgaataccagctcttatggggaactggtcaccaaacaacccatctacaaaccgaacggcctggcctgggacccggaaagaaaggtcatttacctctgcgaatacgcaacggatgaaaaaggcaaacccagcggacgcctgctctccattaaccccgtttcccgggaagttacggaactttccaaggaacggggacagtatgacggactggtttaccgtgacaacgccctttactacagtgactggtccaaggataaaaaaccggaagctgtccgcaggctggatctgaagacggggcgttccgccccggtagccaccggccctgttgaaggggcggcggactttatcttgtatgactccatgatggtggttccgggcatgacggaaaagaaaatccacatcatgcccattggcggaaaaaaataaacacggctgttccgtttttattccccttatccgggccagcggcggcattccccgcgctggcggcctttttcaatttacggcttgaagtacacctggggatgcgcttagttaatggagatatgaacacgatttccgaccaaatcatggaggggatgaaaaccgccatgaaagcaaaagactccgttaccctcaataccctgcgcgccctcaagacggctctcacgaacacggccatcgccaagggaggcttgggaacccggctggaagaagcggaagaactggccgtggtccgcaagcaaatcaagcagcgtgaggactctgcggaacaattccgcgccgccggacgcccggaactggcggaaaaggaagaggcagaaatcaccgttctcaagcaattcatgcctgcggaactcacagcagaagaaacggcggccattctggaaaccgtgatgaaggaaacgggagcctctaccaaaaaagatatggggcaggtcatgaaactcatgcaggaacgcactgccggcagagtcaacggcaaggagttggctcgcatggtgtcagccagactgttatgaaatgctgcgccgccatcatcgttgcggccgggtcctcccggcgtgccggatttgataagctgctggcccccctgcacggcgtcagggtgctggaacgcagcatccgcgcctttgccaactgccgggaaatcacggaaatcgtagtcgtttgcccggaggaacgttttcatgccattaacggcgcaaacctggaaacggaaatacccgttacccgtgtggacggaggggcggaacggcatgaatccgtgcagaacggactggcagccctgctttataccccggaattcgtggccgtgcatgatggagcccgcccgctcattacggtggagcaaatctcccgctgcattcaaaccgccagggaatatggggcgtccgcttccgcacatcccgtaacggacaccctgaagcgtgcggacaaagaacgctttacgcttccggaacaggtggaacgggacgggctgtggtgcatggaaaccccgcaggtctttcaatatcctcttctcctggacgcctatgtggaagtcacggaacggaatattcaggtaacggatgaagtaaccgccctgcagctcatcggccatcctacgcgcctggtgcataatcatgagcccaatcccaaaatcacatggccggaagatatttcccgcgctgaaatgctaatggaactcaagcacctccgcaatgactcatgaccggccttctgtgtaagaatccccgcatcgttctcattctgggaacagggtatctgggaaaagccctggcggaaagcctgcggaaagcgggacatacggccctgacggcggatattgacccgcaaaaagccatttacgaagcagacgttgcagaccaggcctccatgcaggggctggccgcccgcatcccctccccccagatcatcgtcatgtgcgccagcacgaggggaggcggagaggaagcctaccgcaacctttacgctcatggaacgcggaacacgctggaagccttttccggaacgccggtcatcttctgttccagcacagccgtctatggaatcacggacggacgctggattacggaggaacacaacgtctatccctcctccggaaaaaacgggctgcttattcaggcggaacaggcggttctggcagcggggggcacggtcgtccggctgggagccctgtacgggccgggccgctgtgctctcgcctcccagtacgtcacgatggggaaggccctccccggagccatggacagatggctcaattacatccaccgggacgatgccgcagccgccctgcacctgctctgcaccctgcgggaaccgcctgccggcatttacaacctgacggaccgcacccccatgcaaatgggagaaatatactcctacctttccaatttgctggggaaacccgctccgcagcctgaaccgctcccggcggaagcgcgccggggcttctccaaccagaggatttcctgctcccgccttatggccctgggctgggaaccgctctacccaagctttgcggacggtgtgcacaatgtgctggaggcactggaagagtaattttcacccccatccttttccacattgaccggccctttccggacgttccatgtgaaagaagcagcaaaccttttgaaaaaacgacggaattgttccccctatccgcaccccttccttccaagcctctctcaaaatttcatgactgccttccccaccctgaaaaacaattattatatccgccgtctggcgcctttcctgattgtatatcttgtttatgaactcattgaaatagccgtcctggcctttcttcagcaaacgggaacggactggaactccttaacgctcctccggcttctgggcaacctgctcgtggaaacatgttcctccttcctttaccttatcatcccctaccttctctatctggcggcgctcccaaaagcattccatggcggcaaaacggatcacgtgctcaccacggttttttttacgctcttctgcctgttgaactgctgtgaagaaatggcggaaattctgacccgtgagcacttctctttttactcccggcaattcctgcaatcaccgggacacgcctgggctcaaatagcggagggcgtccccattattcccgcgctacttgctgtcctgacaatttccacagcaacagtcgtcctcttttcaaaaaaactcgtacccctgcagccccctccttccgctccggttcgggcatccgcccccgtccttgcatgcgccatggccttcatcctctcatggggaagcagcggccccctgcccgcctacggggggagaaaatggggaaatagccaaggacggccttttctccttctttggggatctgtttgctgttactacgctcccccatctgccttccatctttggaattcccgtactcatcacgggaagcatcattctcctctttctgctggcggaatatattccggagcggttcatgtccgcaaccctccgcccgtcctttctggcgggcaatctcttccggcgcatgaaaaaacgtctccacctccgttccgattttacactctggctccttttactcctggcagcggtacttctcatccgcctcatcagcatgggagcctaccccctcatggacacgacggaagcacgctatgccgaaatgtcccggaaaatgctggaaacaaaccagtggctcgtcccccagttcgactacggcattcccttttggggcaagccccctctctccttttgggcaagcgctgtcaccatgaaactaggaggcgttaacgaatggagcgcacgcctggcccccttcctggcttccctggccatgggccttctgtttttcgcatggccgttccgctctcaatctgtgcaaaaggcggccgcgtgcttcctggtcctcgccgcatcaggcataggttttgtcgcctcaggagctgtcatgacggatgaatttctggctctgggcatcatgctctccatgatctccttctggaaaacggtggcccaaccctccaagcagccgtggtggaaatacctattttttgtcgggttggccataggcctgatgagcaagggacctcttgccctcgtccttacgggattcccaataacactctggaccgtatggaaccgggaatggaaaaacgtctggaacagtctcccctggataaaaggcgccttgctgatgctggcgctgagccttccctggtatcttctggcggaaaggcaaactcccggctttcttcattacttcattgtgggagaacactttcagcgctttaccgtcaaaggatggcagggagacctgtacggctccggacacgcttctcccctgggaaccatctggctctacggactgaccatgttcctgccctggaccctcctgctccccctcctgcggatgaaaaaaacttctccgttatctgaaaaaactacctttccgggagaaaattccttcctgtggctttgggcgctcagccccctgctcttcttcactctggcccgcaatatccttccggcctatgtgctccccggcatcccggcctggtgcatcctgaccgtacaggggctctggcaatggaacaaccgccgcccgggaatcaaacatcttatcttcctcccagcctccatatttggcatcatggccattttcctgctggggcacggattcgaccaacttgaataccgctgccagaaacagctgctccaggcctgggacgggaaatcccccctgtactattgggacagtgtccgccctccctactccgctcaattctactcatccggaaaagttcagcgactggaaccgggaacgctgcctccggacaacggaacaacctatctggcgatgaaacggacggactatcatcagcaccgttccctcctgtccggatggaagcgggaagtggaagaacggctctggctcctgctttccctccccgccggcccaggcaacggaaaacacgcgccaattccgccctctgaaaattgaagggggaaatgcacttcatgagtccggtacatgccggaaaaaaatccagctcgcggccccgcccgtctttgactctcccctttcttgacttgccgggcgcgaacaggcaaaatcccgtgcgcaatgcgtatcatcacaggtcttcaacccagcggcaagctgcatgtcggcaactacttcggagccatggaaccggctgtccgcatgcaggaaagcggggaatctttctacttcctggcggactaccacgccatgagcaccgttcacgacgcaaacacgctgagggaaaactgcagcaacctcgctacggactttctggccgtgggcctggatcccgaaaaatgcgtctttttccgccagtccgctgtgccggaagtcaatgaactggcctggatactcagcaccgtctgtccgatgggcctgctggaacgctgccattcctacaaagataaaatcgccaagggattctcccccagcaacgccctgttcacctaccccgtgctgatggctgccgacatcctgatgtatgactccgacctggtgcccgtaggcaaggaccagaaacagcatctggaagtcacacgcgacctggcgggcaaaatgaacgaacaattcggagaaggcacctgcaaacttccggatgcgctcattgcggaaagcacagccattgttccggggctggacgggcagaaaatgagtaaaagctataataacacgctccctattttcggagaggaaaaagctgtccgcaaactcatcatgagaatccccacggattccacccccgtggaagatcccaaaccgacggaaggttccgtcatcctgcagctttacaaactctttgcctccgcgcagggttatgaagacatggtgcgcggtttccagaacgggggatgcggctatggagacttcaaaaagcgcctctttgacgcttactgggaatacttccggcccgcgcgcgaacgcagggcggaactggaagccaatcaggactatgtgcgccggacgctggaagaaggcgcccgcaaggcgcgcgagacggcctctgtagtgctggacagggtgcgccgcgccgtggggctggcctgaaacggaataaaacggaacacccgggaaagccggggcagcacacgtttttttgtggcatggaaaagtacggaatgttatacagaaagatatgaagaatattctggtagctattgatttctccaacgccacggacgccgtcatccaccaaatcggcaaactggcctgccccaacgacagcatcatccatttgctccacattgtggaacccagcatttgctatgaagtctccggcgttctgccggatgaagtgcccgttcccgtgatggaccagacggaagaaaacgaagtcatttccatcgccaaaaaccatttgaaacagacggcggaaaaactctcccggctgacggacgccacaatcatccaggcggtggaagatgaatttgaaatcagcgaagcagtcattaattatgctgaaaaacaccacatcgacatgatcgtggtgggcaagcataaccacggcttcctctccaccgtctttctgggcagcgtagcaagctccgtgatgcggaaatcccccgtgcccgttctggtagtgcccgtcaccagggaagaacagtaaaaaccgccatctcgccagctccgtcccaatccatgattaccatactctttataggcgatgtggtcggcgaacccggacgcaccgccgtgaaacacatgttgccggaactcaaacgggaacacggggcggacttcatcatcgtcaacggggaaaacgcggctgccgggagaggtatcacgccccgtctggcacaggaactgctgcacgccggagtggatgtcatcacaacgggagaccatgtctgggaccaggcggagctggccccgtggatggaatccgaaccgcgggtgctgcgccccgtcaactatccgcagggaacaccggggcacggaagcgtagtcgtggaaactcccaaggggaaaatagccgtcatgcaggttcaggggcgctcattcattcagccgccgctggaaaaccccttcctcatctcggaagcggaagccaaaagactcagggaagaaaaaggcgtgcgggttatctttgtggacatgcacgcggaaacgaccagtgaaaaaatctccaccggctacaatctggacggcctggtttccgccgtcgtcgggacacatacccatgtgcagacggcggatgaaaccattctggagcgcggcacggcctacctgacggacgccggcatgtgcggccccgccgtcggggtgctgggacggaaacgggaacctattctccagcgtttccgcacctccatgccggccaaattccccgtagcgaactggcccgtgcgcctctgcggagccgtcgtgcaaatagatgaagccacaggcagggcgctcagcatcgcccgcatcagcaaaatcgtggaaaaaccggcctcctgacatgcatgcttcagcagcattcctcttcccgtgcccagtggcggcgctctgcggatgttccggacatggcggaaaccccgtgaagcgcgaccaggatgcggattataagaaaaacctgtttcaacggacgccctccatcacactcgcggaaggaaaaggctgctggcgtcccgcctccccttcccggaataacgggaagctgactgtggcgtccggaatccaaggatttcccgcgtctccatattttcaggatgaaacaacggacagaaacccgggcgcccttattctccttaatctcccatactccggaacagacacgtggtcatgaactatgaagccagattcggcggtataggccgcctgtacggaaacagcggactatctcttctcagaagcgcccgcatagccgtcgtcggcattgggggtgtaggttcctgggcggcggaagccctggctcggtcaggcgtaggcactatcattctgatggatatggacgacctctgcattaccaacaccaaccggcaaatacatgcgttggcgtccacaatcgggcaatccaaaacggaaaccatggccacacgcatccgggaaatcaacccggaagcggaagtcattcccatcagcaatttctacacggcctccaacgcggaaaaactgctgtcggcggaaccggacgtcatcattgacgccatcgactccctgatacccaaggcccacctcatcgcctcctgttaccgcggcaagcaaccgctggtaacctgcggcggcgcgggagggcgcatcaatcccgcccggatagaaatagacgacctctcccgcaccaggggggatcccctgctctccagcttacgctacaggctgaaaaaagattatgcccttccgcttggagaaaaagcccggaaactgaaaatcccctgcgttttctcccaggaaacgcccgtataccccacctgcgacggaacaacctcctgcacacgtgatccggaatcccaagggaaaatgggttgtgacgccggatttggctccgtcacccatatcacgggaacctttggcttctttgcggcttccgccgccattcaaatgctcttaaataagaaaaaaacaccatcgtcatcatgaacaaactcctgctttccctgctgggggccgccctccttcccgccttgacccagtgcaacaccctggaaaaagacattgcaagcatcaacgcccgcaatgcggaaatagcccgcgaacccaggggaaactacttcgtcggccgccgctaccatgtaccggcaacgcgcttctggggatacctgcgccagccgggccagacttggagaacggcccaactcgtcatcatggatgaaagcgtctgccgcaccccggaccgcctgccggaatacaccggaaatccgcgctacgcctacgacaacaactatgaatacagggtatacggcaaatacacgggcaaatacggttacgaacccaattccaatctgaggctgcccatcttcaaaccgaccaggtttgaggtggccaacaccacccccggctggctcttcaaaccctcggaaaaatatgataccggagccgttactctgcgccctgctatcatgcccgcgacaacctccctcccggtccggtaagaaaaacctgtccgcaaaaacgggcccggaaagataaaaaagaagaaaaagcttgatattttcatttctctgcgctaaaaactccccgccttaaggcctccatgctcaggtggcggaattggtagacgcgctagactaaggatctagtggtgataaaccgtaggggttcgagtcccctcccgagcaccatcctctttcataccgcaagttgctggttttcagctcttgcggttttcgtttgccccggcgggaaaataagccgcaacacattttttatcaacaggggagggcatgcgctataaaaagaaaggcatttccccacttccggcccccccgaactcttacttgccggaaacaatccggacgtaatcagtaaaggattggcccttacggcatccgttaaaaaccctccgccatcagggccacggcttcttcacggctcggcatggaacggatggctcccttgcgtgtcgtcacaatggaagcggcggcattggcgaataaaagcatgtccgccaactggccttccgtcaggttttccagcccggtttccagaatccggtccaggcagcatcccaaaaaggcgtctccggctcctgttgtgtcaatagtcttgacattcaagtacgtaggctggtgaataagtttgctttcataggcagcccagcttccttttctgccccccgtcaccagaataaggcgcaaattgtcgaactccctctgcaaaatcctcaatccttcttccatggtggcgcagccggtgaggaagaaaagttcctccatttctattttcatgatgctgcatgcgccgcatccgtagagcatttgttcccgggccagttccatatcaggccacaggggcggacggagattggggtcaaaagagatgagtgctccttttttccgcgcctggctgacggcatgccgggtagccctccgaacattatcgtgcgtcatggaaatcgtcccgaaatggaagacgcgcgcgtgctccaccaattcaaggtccacttctcccgcagtcagcttcatatcggcgccgggattgcggtaaaaggaaaattcacggtctccgtgttcgtcaatctgaacgaaagccaacgtcgtattgacttcccgggatgcgacgagacctgaatctccgatgccttcttcctgaagcgtgcggcgaagcattttcccgaacatgtcgtggcccactttgccaataaaggaggttttgcgcccgagcctggacagcatggacaggacgttacagggcgctccgcccggattggcctgataaatgggcagttcccggtcatttattccgcagggagtgaagtctatcagcaattctccgagagctacgacgtcatacatgcttttgcaaatgttgaaagtgaaccttccggcaaaatataaaccgggagagataaagaagcatagaatgcgacggccttgcgggaaaaggaaaaagagattcattccagtcatgacggaaaaggaatttccccttttatcccgccctgcagaagcctcggaggttgaaggaatgcccagatgtgaacaagtatggcatatatccctaacgccctccactcaggaaatgcccatcaagatgagacggcaaaaacaatcctgcgcgaggcacgcgcggaacgctggagaaagtgtccccaacggggcaaatgcccccttacgggcatttatgggcgcgaccttctcccccctcccattcctccgcaacaaacacgcattttcaaggtatttcaagcttttttaagagaattcaacccttttcaagcatgtgtgatggtcacagtattccgcatttttcttcatgattcccttcccatcctgtaatatgcgcccatgcaagaaaaaagcagcggctttcaatggcccgcacagtggacccccgatattctcgccacgttgatgttcgtggtgcagaaaggaaggattctcctgatacgcaaaaagaggggaatcggcgcgggcaaggtgaacggccccggcggaaaatttgaaccgggagaaacagccctgcaatgcgttttgcgggaagttcgggaagagcttcacattgatattgaggatgcccgggaaatgggcgtgctgaatttttcctttgcctgcggcaccattccggaaatccgctgccacgtgtttatggcgacgtcttttacaggcacccccacggaaacccccgaggcggagcccttctggtgtccggtggacgggattccctatgacctcatgtggcaggatgaccggttctggctgcccgccatgctggacgggaaacggtttgaggcgtttttcacgtttgagggagaccgaatgctggaattttccctgaaaaccggggattgaaccgccaagaaaccccaggttgcggcctcctccctttaagccggatggggaacgctgaactttttttattccgtccttccccacggaggcaacagattcagaaggagggggaaacagaactgcccggcgctccagaaaagattccctgaaattcacctgaaggtggggggcaaagagggggcatttgcccctgaagaccattctgaacagcagccaacgttgaagggtcggcttccgaaaaaaatggaccttcccccttgtaccgggatacatcatattcatctccttccctccaggtatcctgaaacggatcataggaattgctccggacgccagcatcgcagagatttccccatggcgtccagaaaaaggaaagctctccctgccggaaaccggttccggcttgaggttcatgcgaagggctggaattcagccaaatccgcggctccgtaagaaaacggggggatggttgcataaccggaccggtaatggaggtttaagggagcaaatcagctccggcctttattttttccaagcgcatccgaatatccactggtgcatcaaatcccttttccgtaaacgggcgtgggcttttctttttgcccggtatccgggaaatgctgatttttccgatgttttgccttctttttcaggtaatgcgcggatgccttcgcccttgccgcttttttactttgcacggggaaaggacggctcccgcctccgggcatcaggccgtattctttaagcttttcctcccgcttccgttgtgataatgatgcgggagcaaccgtgtgatccttgatcgttcacttgctgactatttcaattcatattccattattcaacatgtatacccccgaattcaaaaacatcctcacttccaccctggacggactgcgtgcggaaggactttacaaggaagaacgctttatcgcctcccagcagtactcccaggtgacgctgaaggacggacgctccgtcatcaacatgtgcgccaataattatctgggccttgctaataatccggaagtgatggaagccgccaagaaagccatcgaccagtggggtttcggcatggcgtccgtgcgttttatctgcggcacgcagacccttcaccgtcaattggaagaacgtcttacccaatttctcggcacggaagacacgattctgtttccctcctgctttgacgccaacggcgggctgtttgaaggcctcctgactgcagacgacgctattatttccgattccctgaaccacgcttccattattgacggcgtgcgcctctgcaaagccaagcgcttccgttatgccaacaacgacatggcagacctggaagccaagctccaggaagcggacgccgccggagcgcgcgtgaagttgatttccacggacggcgtcttttccatggacggcatcattgctcagctggacaagattcacgagctggcagccaagtacaatgccattgtccactttgacgactgccacgccacgggcttcctgggcgaaaagggccgcggcacgcatgaataccgtggactgttcggccatatagacatcaccaccggcaccctgggcaaggcactgggaggcgcttccggcggctacatctccggcccgaaagaagtagtggatgtcctgcgccagaaggcgcgcccgtacctgttctccaacagcgtggccccggctatcgtagccgcttccatcaaagtgctggacctgttggaacagtccacggaagcgcgcgaccgcgtagaagccaataccaagtatttccgtgacgcgatgacgggagccggattcaccatcggcggcaaggaccaccccatttccccggtcatgctgggggatgccgtcctgtcccagaaattctccgcccagcttctggacgaaggagtgtacgccgtcggcttcttctatcccgtcgttcccaagggacaggcccgcatccgcacgcagatttccgcagcccatacccgcgaacagctggacaaggcgattgaggccttctgcaaggtaggtaaaaacctgggcgttatttcctgattcccgcgctttccatggcttcggacgcatcacccatgcccggcggcaacctgccgacgctgcccgtcaagcgggtggtgcgtcccactccctccattccggaccatgaagttgtacgccagatagggagcggcgcgtacggagaagtatggctggcaaaatccctgaccggggcgtggcgcgccgtcaaaatcgtatggagggaggattttgaagacgagcgctctttcaaccgggaatttgagggcattctccagtatgaacccatcgcccgcaaccatccggggctggtccatatcctgcatgtagggaggcatgaccaggattccccgttttattattacgtcatggaactgggcgacgacgcccgcaccggagttcatattacaccggacgaatatattccgcgcacgctccagacggacaagaagttttccggcaacaagcctcttcccctggattactgcctggaggtaggcagccagctggcccacgccctgctgtacctgcacagcaagaacctgacgcaccgggacatcaagctagcgaacgtcatctttgtcaacgggcgccccaaactggcggacataggcctggtggcccatctggaccagcgcagctttgtagggacggagggattcatcccccccgacggccccggcacccggcgggcggacgtttacgcgctggccaaggttctgtatgaaatcagcacgggaaaggaccgcatggattttcccgaactcccggatgacttgccggaaggcaccgtgcgcaagaaatggcaggccttcaacaccatcatttgccaggcggcggaaccccgcattgaagaatgctccattgattccgcagaggagctggcggaaaaaatagatgccctccgggggtatgaagtgccttcccgtttccgtcttcagaagaaaaagaaacgccgcaaactcagacgggccctccaacttctggctgcagccgccgccggagccctgactgcctactggggggctttatggctcaacaacagccagcatccgccggaggaacctgcctcggatattcatccggatatccactcatccgctccggaagaagaatcccgaaccggatacgtgctggtgaccagctccccggcgggagcgtccgtgtatgatgcggacggcaactatctggatgaaactccctatggccccattgaactgccttccggctcccccgtagcctataccatcaagaaatcggggtttgcggacaaggaagaggcgggaaccgtcaaaggaggggccacgctggccctgggcggcgtgctgaaggagtaccatccccctacggacagccagccctggaaggatacggagggtgttacgtacctgcccgcagaaacgcgccatgtggcgcaaggcccccttaccgccgccctgttcaacaaatttctgaaggaggaccgccagaaagggaacttccagatgaaaagggaacagacggaaccggggcatccggagaaagatgtggccctgctcacgcaggacggcatcacggcctacctggcgtggctgaataagaaatgcgagcgggagggactgctgggcaaggaattttccatcaatgcggatccgcttccgcaggcttccggcagcacggaaaaccacaatgcctacgtcctgaatgtcacccgcgtgttccaggtgcccattaccgtcaccactaacccgccgggagccagcgtctttttcaataacaggctcatcgggcgtacccccattgaagaatacgtcaaccaggttccctacgtcattgaaatcaaactgccgggacacgccaccatgcgtcgcagggggctggatccgcaggacttatacctttccctgcagttggaaccggacaagtccgtcgtctttggctcgccctggaccaacagcctgggcatcaaactaatccctgtgggaggaaatgctctggtcatgacccacgaagtgcgcgtaaaggactttcaggaattcctgaaagctaccggaaggaaagctccggcccggcccggctttccccagggagaagaccacccggtggtgaatgtcagcaggcaggatgcgcgcgccttcgccagatggcttaccagcaaagagcgggccctgggcctgattgatcagcacgactcctaccgtcttcccaaggatgaggaatggagttcctgggtgcgtctgacggatgaacagggagcctccccctatgaaaagacgctgcctcatgaaaactcccgggaagccttcccgtgggggtattcatggccgccgcctgataaaacgggaaattttgcggaccagtctgccctgatttacctgccgtcctcccgcgttatcgtaggatataacgacggacagccgtatacggcccccgtaaaaacctttccgcccaaccacctgggcctgtacgacctggaaggaaacgtcatggaatgggtagacgattcctacggggggccggaatccctccccatccgcaactacggcgtcgcccgcggaggcagctacctgtccttccgccccaaacagctcaccacttccatccgcactcccctgccggaaaatacgagggataacgcgctgggcttccgtcttatcctgtcttccgaacgccccgccattccaacggctccctgacgccgtatctgcggcagcggttttccccgctctttccccctctgaaacacaccgccccccccaagggggaaagcccttaggcttgagagagcttccggctctccgggaaaatgattgaaagggcctcccgttatgctaccatttttccgcatccttttcctgaatgaaaatcatcgccatcgccaaccagaaggggggagtgggaaaaaccactacggccatcaacatggctgccgccctggctcagctgaaaaagaaaatccttgtcattgacctggacccgcaggccaatgccaccagcggcatgggcattgacggaaaagacatgcccagcctgtatccggccctgctcggccagcttccggcggaagagtgcatcctgccttccggcaggaaacggctggatatcatcccctccaccatggacctggccggcgtggaaatagaattggcccgttccggcaaccatctgacccgcctccgggaaacgctcgctcccctgcgggagtcggacacctatgattactgcatcatggacacgccaccttccctgggcgttttaatgacctccgccctggccgcctgcgacgaagtgctgactcccctccaatgcgaatggttcggtttggaagggctggccaagattctgcacgtgacggcgcaaatctgcgccagcggcgccaatccccgcattcggcatgaaggagtactgatgaccatgtatgacggccgcaccaatctttcccgccaggtcatcgaccaggtggaacggcatctgccccagatgctgtacaaaacggtcatcccccgttccatccggctgggggaggcccccagtttcggccacaccatttttgaacacgatccttccggagctgcggcggacgcctacctgaaagcagcccgggaattcatcaaacgccataaaccctgaacatttggagaaacaagcttcccggaatgccgcaaacctctgcgggagggacaggcagaaagggcaccgcagaaaactttctccttcattttgccttccgggtttgttgcgtccatttaacgtcaggaaaacctcttccataccgcccccccggagacggaggaaaacaggcattccccttgacttgacttccgcggcatataagaatgctccagctccgtttcaggaacttttcccctcatgccagcagaagaaggccagccagacgaccagccccgggtgacagggcaagtcccgcctcccgctccgacgacaggcctggaacagattctgcccggacgtccgcccctgccccatgcggaagaaaaaggggcctttttcgtttaccagcgggagctggctcccggtacacgcctggaacaatatgaaatcatccgcgtcctgggcagcggaggttttggcatcacatacctggcgaaggatctgttcctgaaccgcaacgtggttatcaaggaaaacttcccttcaagatactcctaccgggaccctctgaccgggcatatccggcccaataatgaacacgatctggaaaattacacctgggctctgaaaagttttctgagcgaggctcagacgctggcggagctcaacaaccccggcatcgtcagaatcctttccgtctttgaagccaacggcacggcctacttcgccatggagcatattaccggcctttccctggattatctgggggaaaaacttcacagcaccagacaccggtatacggaagacgaactcaaggggctgctgacgcgcctgctccggattctggactatctccattcccggcacatttaccaccgggatatcaaacccggcaacatcctgctgacggaggaaggcacgcccgtgctgatcgacttcggagcggcacggcatgccctgaaacttcatgccgccaccgtcctgaccacccaggggtattcctccccggaacaggcgctgggcaaaacgaatatcggcccgtggagcgatctctattccgtaggggccactttttacgccctgcttacaggaaatcctccggaccgtgcggaagcgcgcctggcggaagatgaaatgcagccgctgcacagcgaccccgtgctcacccgctattactcacggcagttcctgctttccctggacaaggcgctggccccccagatcaattgccgctaccagactgcaagcgaatggattcacgacatttgcgccatttccggggaagaatcctccgccactattcaagtcctcccggcagacctccgccatgcccatccggaaggaatgccaactcccggcgccgggaaaaacatcggcagcagaaaggccgccaccggaacggacggtcttcattccgcctcacgcaggcagtccgcacgcgctcttcgccgcaaccgccacatgatgtccctgctggtaggaagcgcatgcaccatcctgctgggagcgggagcattttatctgctggattacatgaaaaaagcccctatgggcactaccatcaataccatcaaggaagccatccagcagcccgcggcaagctccaacgtgggagaaccggaaccgccgccacgggatctggcatccatccgcattccggaactcaaaataacggaagacgcggcgctggaaccgcggtcgctgacggagttccgtttgcgccttgacgacaccatcctgacccgttccgggcttcctcccatcctgccggaaaaactgcgcatctcctgcatttatctccaaatcattcccccggcagcaaacggggaaaaactgtacctcaccatccgggattccaacggcgtcctggtggaccgctccatcaatgccgtcccctccttcacggtgccggggcaatccacctccaccttcttctttcccgcgctcccggaactgtccacggaccgcacctatacgtattcctttgaaaatgccgcccaccaggccgttcccatgcaaatggcatgtttcaaaaacgagacgaaacgcacggaagaagccttcccgaaaatccgtttcatcgctgctcctcccgtgccggaaccggccctgctccatgacccggcctacaaaaatcttgtggcggcaatcgccgagccctccccggagaacaaaaatattctcgaccaggcaagttccatgccgggcatgctgcaagccctggagcaactttccaaagccggctacccgatagcccagcaggcactggggaaaaccctcatgtctccggactgtcccggcggttccaggccggaagaaggcgtggaatggctttaccgttccgccacaggagggtgctatgaagccatgaaggagctgggcatcctgctcatggacatcccctcctattttccccgccttccccagcagcctccccttgcctcccgggattacgcccaggcagcgcgtttcctgagaatggcggtccaataccgggaccaggaggccctgtacctgctttccctcatgtactcccagggctggggcgtacccgcctccccggaactttccagcctgatgatggaacgcctcaatggatcctcctactccacggacagcctgaatcccaacgcgcccatcgcagcgtactggcttccccttcctcttaccggagaaaaaaacaccattctgcgcttcactattccagggccgttcgccccgtcccagctcaagggcgttattctgcacaacacaagcctgaaggatgccttctccatcagtaaaatcaatatcctccaacatgggcgcctcattctggacatcatttccccccaggaagtgctgcccggcaaaagctccgctcccataggcatatccatcccggaagggctgctggcggatacgaccctgcctctggaagtggaaattttgctgacccccggaaacagctgcggcgtggtggaaatgccccctccggcggaaaagaaaaactccggaactgaaatcaattaagcttcaccgcttttcaacgcgaaacagcaacaggggaaacggaaaacacccttgattcccgcccggggcatgctacaaaggataaatgaatgcctctgttttcctgcggagcatgctccctatgctggccgcgttcctgatggcctcctgcggtgatcctaccgtctcctactggaaagaggtggcggacatcaatacggaatactcggaaaaaagcgacgcactggtgcaacgcctcctgaaactgaaaaaaaaccctacccttccgggcctggaagaaagcagcagggatgcggctgacctgttgcgggaaagggacgaagaactggcggacctgagcacgaaaaacgtggatcccgccgtgacggcctatgtggaagaagaccgcaagctttttgccagaggaagggaattggcggaacgctaccagcaatactttgaaaaatatcttaagggaggaccggaatttactctggatccttcccgggccgtcgcccatataggccgaggccggcaggaaatacgcaaaattctggcagaagcccgaaaactggaagaacgggctgaaatgctgagaaaagaaaaatcagctgagctcgagcaagaacttcctccgctgcactttcgccttccggagttgaaacaactgctatccagccgttagaaaacgcgcacgaaccacttgcatcaatgctgagtcacggccagtctgacagcggcctttccactgcacgggcggacacaaccggctcctgaaactttccccgtccatgttacggaaataacccttccctggatttacgggaaaaacgagcccccctgctgtccatcatcgtttatttcagcattcaaatttcattccctgaataccccttagcacaggctccatagtttaaaatcccaaagaaggggtatgcctcccctccacaaaaaagccccattcatatttcatgaacggggccatattaatttttcaaattcacctgggagtttgatcaatgacgataaaatcctttttccccacatactccctccgggcatccggatctccatatccgtcccggaaacgtacttccaattcgtatattttcccgctggccagaggttgtaaacaggtcagcagcaaatacgcatccttgacgggcacttcatatttttctccggggttcagggtaataaagcgcataagattcgcgacacgttccatttgataggagggaagataccatgccgttggcctttctcccttctttccgtttccctgactccatatcttgatgatcatattcggtccgcgttccttgagaggatagaagtcgtcgaaaagacgcacagccttttctcccttgttgacaaacaccagcttgaagtctgggaaagcggctcttggatcaaacgaagtcttttccatcaccacggaacattcaattccgttgttcgccttgtccccccatgcaggagcatggaagaacaggctggccaaaagccctaaaatttggaagattttttcattgcagcgcgagcttttgggagaaggcgagaattcgcgcttcatcgtcgagttcccttcgtacttcccttcctggataggttccttgtacatcgtgacgttgaacgcgaccgcattgccactagagggatcgtaagcgttattctcatactttaaagccaccttgtaataaaatgtctcactatctccagggcgattgatcgaccacggaaaaatcttttcttcctacatacttcctccgaacaccgggatctccatatccgtcacgaaagattacttccaactcatatttctcaccattgcgaaggcggcgtgaaggcccaaaatagtgcatcaacagatacgcatctttgatgagcacttcatgtctttctcccggcttcaacgtgatgaagttcaagaactgtcctcgctcaatgcaataatgagggtaatatgctgctaccttttcctttttctcttttgtcaatttccaaaaaatctctatggaaatatgcggaccgttatccttgagaggatagaagtcatcgaaaagatgcacggtcttttcgcccttgttcgtgaacaccagcttgaagtccgggaaggcagccctcgcgtcaaactgggtcttttccatcacgacggagcatttcactccgttgtcggccatgtccccccacgcaaccgcatggagggacaggcttgccagaagtattaaataccggaagatttttttcattgcagcgtgagcctggccgtcgcccgaagaacccccaggaaacaatccttaccctgctgattatagtagcgcgtttccagttcacaagaacattgtttccagccttccagatcgacttcatccagacacaccggaatcgtgacgctgtattcctgaccgggggcaagctcccggtagttcaagggtctctggaaggtcatggtgccaatttccctgttcagaacgcgcattttcccctgttgcgtcctcaacaccgtcacgaaaaagaaatcggacgtttcgtcgttgatttcgtccggaatccggacaggctcgtttccttcgttgcggaagcggactgtgattctgccttccctaaaccgggaggtatccgcaatggagagggtcaagggcgccggttcctccgcaacagccatgctgcgggtttcaccttcgctgaccggaggtatgaaacagggaggctcgatcgttccaggtttcgtgataaacctgggcacattgttccaccccatcgcgttggacagacgaatgacataggcggttgcctcgttcaggacttcctgtccggcgcaatagggtctgtcattggcatcatccggcaacgccagtacataggctgatgtctccgtccaaagatccaatgccatttcattggcaagagcctgcatgaacttcacggctttatccatgttcggttctttgtcgcaggagatagtctgattttcaagcatttcctgtattttggagtccttccagtagaacttgtaggcatcctcccattgacggcggtggtgttcttcgtgggcgagggaagcctgcggcgtgtgccatgtgcccactcttccgcaggcctggtagccgttcatttcgttgaccgcttcggtggcttcttcttcattgagagggggatcaacatagggattcacgtaaatgccttcatacatagttagcttggctccggcagaaacggaaacaacacgacacctccatacgttttccgattcatctttgcaaaccgttacgcaaatcttaggcctcaagctacttacattgcagtcaccattcccttccaaatagacgggttccggtttctcaaattccagttccacttccttggatggctcacaggtgatagtggattccttctcaatcgtccacaatttgattttgggggacggcgagaattcgcgcttcatcgtcgagttgccttcatacttcccttccgtaataggtttggtatccatggtaacgttgaatgcaatggcattgttgctgacgggggtgtaggcgttgttggtccacgacagggccaccttgtaatagcccgctttcaggtacctggaatcggtttcaatattcagcttgccgttgggcggtgtcccatccttttttatagcttgctcaccggcaatcgtcaggctgcctgtgtcgtcggcttctacgccgaaataatacaggccgtcttcctcgaccttgatgaacatttccggcgctccggcgcaagtggcgtgttcgcacgccgaaccgtcaaagttgaacgtcatcgcgtcaactccgagcgtcttgctgataagaggctcatccccttgataaatgcagacgggattaactgccttgttgattggtatgtagttattcattgctattgtttctgtctactttctggaaaaactgaaccatcagccttccggtatttctgcggcattacctgaacccatcaacacgtttaacgcgtagtcccccctcattcggaacgaagaggaacgacctcccctctaattttacgtgctgccgtgaacttgcaaaaaaactcctggtgcgtttttatatcctgattcacgccattttggaacaaggttgctccatatagatctgacaacaggcacgggcggcattccgccgcacaatcatgatgccttaaaaaacaagcattctcctccttctctgtccgttccgccaaagaaaaaggctgtttccagagagtccttcacttaaaaacaaagcatcttttccaaaaacgagattgacacctgcggttcttttccctagtatccgcgcacagcatcagcggcggggtagccaagtggtaaggcgacggtctgcaaaatcgttattcgcgggttcgattcccgctcccgcctccaagatgttgtcaaagccggttcaagtcgcgttcgtctagcggtccaggactcccgcctttcacgcgggcaacacgggttcgagtcccgtacgcgatgccagcttttcttttttccaacttgcaccggaatcttttttacgccatccccgcggtatgattctggattttttttcctgttgtggtacagtagcttccgtcatggcaacccagaacgatattatgctgaacggagccccgtacgaactggcggaaccctgttccgtctcccggcttctggaacttttgaacatgaaaggcaaacccgtcgtcgtggaacacaacggggccgcgctcctgccgcaggatttttcccgggtgacagtttctcccggcgaccgggtggaaattgtctccatcgtcgccggcggttagggttccgctttctggaacagtattttccaatccgtcatcgccatgccatccatccacgtcatgtctcccacccttgccagccaagtggcggcaggagaagtagtggagcgccccgcctccgttgtgaaggaactggtggaaaacagcctggatgcaggagccaaattcgtacgggtggagatacgccgcggaggcgtgggcatgatcaaggtgacggatgacggcagcggcatgtcacgggcagacgccgagctgtgcaccaaacggcacgccaccagcaaactttcttccctggaggagctttttgaaatcacacacctgggattccgcggagaggctctgcccagcattgccagcgtttcccgcttcaaactctgtaccaggcagcagcaggatctggaaggctgggaaatacgcattgacggcggcctggaacacgaaccgagaagctcaggcatctctcccggcaccgccattgaggtggccgacttgttttacaatactccagcgcgccgcaagttcctcaaatccgcagaaacggaagcttcccatgtggagcaccagatacgcctgcatgccctggcttatccccaagtacggtttgcctataagcgggacgaccagcttgttttcgaccttcccgccacagcggatctgcgcgtccgcatttccgcactgacggatgctgccacagcagcggccctgattccgatagaaacgaccatcggccccggtatttccatcacgggattcctgcttcctctttccgaagccagacgcaccagaaaagggcaatacgtctttatgaacacgcgccccgtggaggaccagctcattaacagggccattcgggacggctacggaggcttccccaccggactgcacccggcgctttttttgtatatggaggtggagcccgctctggtggacgtcaatgtacaccccgccaagaaggaagtgagattccgccgttccgcagacgtggtaaataccattgtggaagccatagccaacactcttcaaaagcatgcccggcaggaaatctacgctgccgccgcgccggagccggagagaactcttcctcctgcccattctaccaccgcgccgtatggggaaatacccgcctgttccaccaaccccggttctgctttcccggcggccgccagaccggcccctgcttcttccgccgcccaaccgccgctttcctcctctgccagacaatcccatgggcctgtccctccccccaccctccgggccattcccctgaaacaggttcccgccacccagggaaaactggattttcactgtcaggaggatgaagaaacggcacgaaacgcccatgaaaacgcagctccagaaagggatgcctccgccggattttcctatctgggaacactccgccagcaattcgccctgtttgaaacgccggaaggcctggttctgatgcatcccaaggcggcccgggaacgcatcatatttgaacggctgcgcgcacgccgggaagcccccatgccgtcccagcagcttctggatccggtggtgctggatctggacccgcgggattttgccgtcatccggcagttcgccccgcattttgaccaggccggcatggccgttacgccctttggtcagaatacaatcagaatagaatccatccccgcactgctggaactggaaaacgcacgcgcttttctcctggagctggtggaccgtctcacccagtctgaattcagccgaaatgccaaacgcatggcttatgaaaccttcattggggaatttgccagaaaatccgcctggagggaacgcatttcccctcaccgggcccctgccatcctaaaggatttgcttgcctgtgaagtgccgtactgcaccccgggtggcaaacccacgctggtgaattattccgttccggaaattaaacgtaaattcggcctacaggcataaggataagggaaccttgttttccggaaaacaggccgaaacactgcaagattttacggcaaacggaaaatatgcagccaaagacggattgacgcccgcttccgcagtatatttattttcccttaccgatactcagttttatttcagccgcagcaaggggcagaaactctccctggcaacagggagcattttaccctgtccggctacggacaccttttccgtcttgtccgccagaactctggcattcggacgcatcctcccgcatacaacagggagcttgctcttggcaaggaagtttcccgcgtttatactgcagccttccagataaattcccagccatgccagactctccccccagcacctcccccgctccgcgcattgctgaaactgccgccgggaaaattctggcgggcctcctggcccttttttacatcttcctggcaacgacggcggcaggcggggaatggcacacccttttccttcccgcctgctttctggcggcagccctcctgctgttctgcttctgtattctccggggatacaagattcccagccccggactgccgggctggctggccctgggcctgggaggcggctatttccttgtccgggcatggttttccccctggttttattatgagagcgtagcggatctgggccttatcgccacggccatcgtcatgttcgcggcgggaacgtatgccggagccggaaacggggaaaagagtattcttcccgtactggctgcggcattggggctgctgaatgccctgctgtgggggtatcagaacataacgggaacggaagcctcctggttcagaccggattattccctgttcggcacggaaatccgcaatatcggattgttcggatacaaaaatttttccgcccatttcctgtccgtcaccggttttttcctttgcgcatacagcatggcttccgccagaaaatggggcatccgcctgttcacgggattggcgctcatcctcgtttccttcacgtgcggctcgcggtccgccttcccaaacgccctggctggcgtaaccctgtgcttctttatttatacctccagcgttttccgcaataacagaaaattttacacggcgtccatcctctttattatcctgcttttcctgggcacgtcctatgccgtgctggatttgtcccggggggcgggcaggcttgccgcccttctggatacgttttccttcggcaaccggctggacctgtccaaactggcctgggcgctggcggaccaggctccgctgttcggtcacggcagccggatgtacaccaatctttccacggagtttttctccggagccaacctccccaattttgcccaccacgaatacgcacaagccgcctgcgactacggctatgccgggctggggctgatgctagctctgctggccctgtttcttattttcggactccggagcgttctgaaattgtcaggagaacatcaacggcccaatcctctgggaccggcggcgttctgcgtattgtgcatcgccgctttccacgcctatggggaattcatctggcataaccctgccttgcttggagccagcgccctatgcggcggcattacctgcacggcccctctttccagggtgaaggcttcgcgccaagtcggccgctggcttcaagcgaccgccgcactgctgatggccatattggcgctgtgttatgcgtttctggcttttccggtctggaaaaactcccttcaagccgtcccggcttcctccggcaaccggctgcccatgctggaagcggccgcctcctgcagcctggacccggatttggtgcggcgcaacattctgcatgccgcaggcagttctccccccccaaacccggcccggctcaaagcattggagcatcaggaagaaaaagcggaattactgagccccggaaaccacggcctgacggcggctaaaagcctcctttacatcctgcagggacgcctcacggaagcggagcaactgctccgcccatacgtagagagtcctggcaggtttgatgaccgaatgttcgcctggactaccatttacaataatatgctgtattcctggagtacggccattgctgcccagtcccccggacgcgccctgtccatggccatgacggcccagcgcctgatgtccgcccaaacggaccggtggctgtattatggggccctggatcccgaagtcaggaaaaaacactactcgcgcctcaatgagctcaagatgctcatcatgatgctccaagcccgcggagcggtacccgacccttcctggaggaaatagtattccggagaatcgggaaaaaggaatatgtgcagcagccgttatatcctttttccagagaagccgctccatacagaagtttccccgtcttatccggtttcttttttaccggattccacgtcagcttatttgtccacggaacacagagcgtactgcagccagaaagatgaaaagccgacagttggcgcagcaagtccgcacaggcgttacgccgggattttaagcggattcagctatcttccgccggaagcggcagcctctccggaacagaatcgtttgtttctttttcccccaatcgcggactgccccggttggcggtcccgtaaaacgcatgtcccgacgcagctcaacagaaaaaaactttcccggctctattcctttatcgaatctttttgtatgaacataaccatcaaacgaatttatgaccccaaggaacccggggacggataccgcgtcctggtggaccggctctggccccgcggcatttccaaggaaaaagcttcctgggacgagtggctgaagaacatagctccatccacggcgctccgccagtggtttgctcatgatccagtcagatgggacgcattccgcaaaaagtacgacgaggaactggatggaaacggagaagccgtttcccatctgctccggctggcgcggaaagggaaggttacgctgctgtactccgccagaaatacggagcacaacgaagctgcggctctgagggattaccttttgcaacggtttgcttcataaatagaagcatattcctgcacaaactccatccgcaagccccaaatgctgtcacgggaacctatgatacggcaggatttcttctctcgttcatgaacaagcgaagaaaatggaaaggaggtgaatacaatatggccagcagttcccacatgggtggaagtcataagggcagttccaaaaaacgctccgagactaccacaagcaaaaccgggcggcgcatcaaacgcgatgcttcaaccgggcagtttatgagcgataaaagctcaggctccaaggaaaaacattaatgcccgcgagtttttcgcctgattcaggctccggatccggtccggagcctttttatttttctccgcatccggaacacgaggaagtcttccgccatccactcaggcccaattcttcaaaagcccgaaggcccagcgcttcaggggctttccggtctccgcgaatcacaacggcaaaaggctcttccctgcccggaacgtaatacgcagcccgcagaaccagttcctctccatccggatgggcgtaaacacccacgggcgtggaacagttcgcacccagacgtaccaggaaagcccgttccgccagcgcacaggcaaaagattccggatcattgatgccttccagcatttccgccgtctccctgtccgaggaacggcattccattccaacgatgccctgccccacagcaggaataaaaacttccaccggcaagggacgcatgtaaagttttcttccttccacaagggtttccggcgcgtacagccccaggcgttccaaaccggccctggccagaatcacggcatcccagccgggatgttccaccagctttcccaaacgcgtaggcacattcccccgcaggttttcaaaccgcaggccggaaccccagtacgtgcgcgccatcaggcgtcggcgcacgcttccggtagccagcgttccggaaccgttccagtccggttctttcgtgataagcacatcctccacggcagcacggggcaagacggcggccagcgtgaagccggcggcaagctcgctcggcacatctttgaggctgtgcaccgctacgtcaatgcggccatcccggagggcggtctccagttccttaatgaagatccccttgtccaccatgccggaaacgcgggccacatccgccagaggaacatccgtgcggcggtccccaatagtatggatgatttcacagcgcacgtccagttccggataacggagggaaagggcagcacggaccatatccgcctgggccagggccagggcgctcccgcgggtgccgatgatgagggtatttttactggtcataaagagcggaatccggaaaatatctggaaatgctgtcccggatgatggcctcgcaccgggaaacctcctgctcccggctgcgcttggcctcatccgccagctgggtgagggtatcaatatcgtagagatacacttcgtcaatatccgccacgtccggagaaatgttgcgcggcacggaaatatcaatcaaaaagagggagcggtatttacgggaggcacgcaaaggaagaagcgtttcccgggtgatgatgcagtggggagcagcggtggcggccaccaccacgtcaatatccctgagatagttcccccacacgtcataccggatggcctggccgccgatcatgcccgccagctctaccgcacggtcaaaggagcggttggccacataaatgccctcagcaccccgggcatgcagggcgcgccccgtaacgcggctcatctcgcccgcccccagaataaggacgcgggtgccggaaaggtccccgaaaatttgttccgccagctccactgccacggatcccacggaggttgccccggcatgaatctggctttccgtccgcacttttttaccgatagcaaaggctttctgaaaggttttgttggcgcaggccgcagttactccggcatccagggccgtctggtaagccgtttttacctggccgaagatttccgtttcccccagcaccatggaatctaggccgctcagcacgcggcacagatggcttaacgcatcttctccctgatggctgtaaaaataagaagccatatccagttccccgcgcccatcacccagaaaatgggataaaatgtgctcctgcgcattttccggagcgttggaccaataataaatttccatgcggttgcaggtggaaagcacaacgcactggtccactccaggaagggaacggatgcgctgtccttcttcccggagcttatgggacggcacggcaaaccgctcccgtatttccacgggagcggtccggtgattcaagcctaaacaaaccattctcatcaacttaccaggaaaatgctcatggatgcaataaagagggccacgcagcagcaggccaacatccttcccggaatgccgcggcggtagatgaaccacagcaggacgctgtagcctgccgtgagaagaatgacaatggaggtcttggccgcattaatggggagattcccccgccacccaagccattccccaagcagaagaaggaggaatgccacaagaaccaggcgcttcatgctggcttccagtgtacggatgggaggaagcacacggcaggtgccgggaatccggtgtcttttaagacattcattctgcatgcagaacgccgcccccgcggcagcggccagaccgccggctccgtaggacatcatggctatgcccacatgcgccgtcacccagaagtcatgcgtgccctgcacgtccgctccggaacggcctatcagcagggaaaaaaccgtcagcacggcaatagccggagccgtaaagatgccaagcacggacattcggtaagcacgtcccagcatcagataaaagagattgatgctccaggagaggaagaagagcacctctgaagcgccgcggatgggacacattcccgtctggtacgctttgacgcatagcgcccctgtctggagaacaaagaggcacgccatccaaagatgggcatataaaaacctgcggccggaagccagcaggcgccatcccagccctgtgaaagccagggagaggatgagagaggcaatggcccaccagttatcgttcataaatccggcccggaaatggttcaggaacgcaaatcgcgctcaatgacggcgtatgcctggtggttatggatggattcaaaattttccgcttccacccggtaccagctgaaggcggaatgactctgcgttttcaacgccacgttgcgcaccagatcttccacaaagacagggttttcataagccttttccgtcacccatttttcatccggccttttcagcacgctgaacagggagcagctcgcgcaggattccaccaggtcaatcaggtcttcaatccagacgggcctggaagcaaaacgcacggaataagtaaccagcccgcgctggttgtgggctccgtaggcactcatggccttggagcaggggcacagcgtcgtcacgggaacgataactgtcagcttgaaatcagccagtttgttgttcgcttccgcctccatctcaaaccggacaacgtaatccatgagcccttcaattccggtcacaggagcgtttttggagcggaaaaacgggaattccatttccacatgggaacggcgggcggacagacggcggagcagttcccgcggaatggccaaggccgtatgcacatccagcaaagggccatgctggtgcaacgcctccacaaaacggctcatatgggtgcccttgaattcttccggcagatccaccgccagagaaaccgtcgccacagtggactggatgcggttgagcttgtcctgtatctggatggggaagcgcaacccttttacgcccacccggtcaatggaaatattgcgcgtatccgcctcggactgggtatctttcagttcctgcatggggaaaaaggataatgggtggaaataaagcgggagtctgccctgttaccggacaaactcccgcctgcaaagacaattctaccgaaagagattttccttggggcttgttacggcagaaggttgatggaacgggcccgcttgatttcacgggttaccttgcggtgcatcttggcggacagcccggtcacacggcggggaagaatcttgccggtttcagaggtgaacttggacagaaaatcaggattgagcagattgacctgatccatcgggatgtcgagacggcggcgcggcatctggcgattgcacgtgcggaaacgaatacggcgttctacagtcttgggttcagtggacataataataaagataatcgataagccgaaccagttaacgcatttcacgatgaagcgtgcggcgcttcaggaaaggattgtacttaatcttttccaggcggccgggagtacgcaggctttttttattgcgcgtggtgacgtagcgggacgtaggctttccttcggctttggcctcggtgcattcgaggatgatgatgtctcttggcatgatgaaaatgtgttacgggggaggatttatacactattcttcgtcatcgtcaagagaaacagataaatctacatcattttgtcctccggcaaagcccagggccactctgggacggaacctggcattctggcctttttccttttcccactgggcctggcattccacggtaagccgagcaaaggggatggcctccagacgcagaatgggaatgaccttgtatgacatttcgcagatgccatatgttccgttgtcaatgcgggcgagcgcctgttcgatttcatacaggccgtcctgctctttggaaagcaggctgagcgcaaaatcacggtcataggcgtcactgccggcatccgcctggtgttccccggagccggaagcctcactgccttccggatgattccggagagtatcgcgggccacgccgctcatgttgtccagagccctgtcgcgcaagtccagcagatgctggcgctgcatctgcacaaaaggctcccattcggggttggcggccagttccgccctggcggcggcaatggcttccgcctgttcatccgtcaattcatttttcgcgggagcgggaaccggggcaacgggagcaggagcagcttttttaaccggagcctttctggccgttttcggcgcaggcttcttttccatttcagccgcggcggcggcagcctttttggcgggcttggcggctttttccggttcagccgcctttttcctgcagcatttcttcttggcgggagcctccaggtctacagcggtcttgcaatcggacttcccgcaggtctttttcttggaagccggaacttccttggcgacggtcttgctattggttttcttgggagtaggcataggaggtgtctctatgggctgaggttgacaatatttcacgaacagagggcggaacacgccccgctgactagactatgagacattacaaacgcccaaatgttcattcaagaaaattcagtgatgaaacaagtcattttccccccttttgcaccctctattttcctgtcgggattttaccgggaacatacttcttttaaccttttcaacgcccggtaaaattctatattggcgttatatgacagcttcaaccattccctccatcggcattgacttcggaggcacctccatcaagatgggggtcgtcaagggcgcggaagtaatcgcccacgctccttcaatagccacccaggaatatggcaatcccgatcaactgattgaagccatagcccagttcgtgaatatgctgcggctgaatcatccggaagtgcaggccatcggcatgggaatgccggggttcgtcaatttttaccaggggaccgtttatacgcttaccaacgtgcccggctggaacaacgttccggtaaaggacatgctccaggctgcctgcggactgcccgtatacgtggaaaacgacgccaactgcatggcttatgcggaatggaagctgggcgccggaaaaggaaaaaggcatctggtctgcctgaccctcggcaccggcgttggcagcggcctgatcgtgaacggagaacttctgcgcggggctacctgctccgccggggagctggggcagacgagcatcgactaccgggggcgtctgggccattacggaaaccgcggctccctggaagattatgtaggcaaccgggaaatagctgcggatgcacgcacgctgtatgccagccacggcattgacaaggccattgtggactgcaaccccatctctttggaacgggccgcattggctggtgatgaagtagccgagcaagtatggcgggacctggccgtaaaactctcctgcgccctgatgaattgctgctatctcctgaacccggaagccatcatcatcggcgggggcgtggccaaggccagaaccctgcttttccagccccttcaggaaatcatgaaaacccagctcgccgcccctctggtggaataccttgaaatccttcccgcccagttcggtacggaggcgggcatcctgggggccgcccatctggctctcaacacccacttcggagaaacattccgggcctgatctcgtgtcttcctcccaaatactcaaactcgcccgcaaactggaattgacggcggaacaggaacgggatttcctggacgccatgcaggccgggaaccgttccagaagcgcgctggtcatcaccccgaaggcaccggaaggctacaggccgcccttgcaggcaaaggacacgccgcaggagtgggggcattcctccatcttggcgctcccgtccggagaggcggaaaccaaacccggctccctgccggattacgaatgcggctattactatcccctggatctttcgtccgtctgggaaacggcccctctggcgcatcttccgtttcgtccggaacgctgcctggacatgtgcgcggcgccgggagggaaaagcattctggcgcagacgcgggtatctccgcaggagcatgtttccaacgaagtgaatccgaagcgcctgggcattctgcgccacaacctgcttcgctgcggcttcaccaatctgtacacccagcgcctgcgcccggaccagtgggcggaactagcccccgggtgttttgacctcattctggcggatgccccgtgcagcgggcagtccctgctggccaaaggcattcccaaccccggctgtttcaattcctccgtcaccggaggcaacgccaagcggcagcggggcattttgctggccgccctccggtgtctggctcccggcggcttcctgctgtacactacatgcacctacgctccggaggaaaatgaacgcaatgtcctgtacctgctgaaacgccatccggacctgcacaccgtaaccgtgccggagctggagcatttccgttcctccctgacgcaggaagcctgctaccggctcatgcccttccacggagcaggagcgggcggtttcacctgcctgctgcgcaaggagggaggccatccgctcccgctttccctgccggatgaattgaaggcatggcccattcatgccatgaattgttgaaaaaagatgaagataggcattttttccgacttgcacaaccgcacagaccatctggagccagccatgcaccggatgcgcctgctgggctgcggacatttcattttcctgggcgactgcaccaccccggagagtttccggcgcctgattgaactgacggaggactttcctctggatgccgttccgggcaacaatgactacgatgtggaaaccatgcggcggatggccgccagttcctcggcggcgcgcctgcatccggaacatgcccttatcacccggtacggcatgaaactttctctctcccattacccaaaatacgccttgcgggaagcgcgcagcggaaacgcagacgccgccctgtacggccatacccaccaggccgtcagcgaaagatgcggcggctgcctgctggccaatcccggagaactccagggcaggaccggacgcatcggtttcggcgtcctggatacggacacccgcatcatcaacctgcataacctggactttcacgccccatgaacacgctggacgtctgctgtgccctgattgaactgcccgccgcacggggccctcttcttctgggcgccaaaaagaaaacggggcagtccaacgggcttctttacgaattccccggcggaaaagtggaaccaggggagaatgcccggcacgccgtcatacgggaaatacgggaagagctgggatgcaccgtcttccccgtccgcatgctcacccccgtacggcaccaggagcctgaacgcattatccgccttatcccctttctgtgccgtctggaactttgcgccctgccccggcccctggaacatgaaaacctggggttcttctcccgccgtacgctggaagaactgccctgggcgcctgcggaccgccttgtgttaaaggaatggctggaagaacaccgctgaaagcagcatccccttcaaactcaatcgctccacgggaaagttcccgtccatgtctgaaaagattgcaaaaacaccttggaacattccctaccatgaggtatataaggtggtggctgctgcactcgtcatcgcctggcaaagtggcccggaccgatattacaacctaatgggggcagccccgacgcagggctgactacgtcctataccggaaaagtcaaaacagcggcggaagtccccgctctattgaggcacgggaacgtggctcacagccagagacggtgcagcggtgtcttttttccatcacctgaatccagaaagctcgttctttcaacgtttctccccctccttgagcccgcaggtcagccgggattcccctcttgggcaacattactcctgtcgggattcaccgcctttccccgctcttctcacccccgcagcatttacaggcacggagaagccattccccaaaagatcggatgcggtcaccggcaactgccgccttcagatatttcgtggcactccattcccgctccttccgtcactggacgagaaggaagaaaggaaatattattagttaataaacagcaactgttaataaacataataatcccttagacatttccggaaatcatgataggatcatgctctgttgcggaaaagtttttaacatccgtgcaactttttcattattgcgaagtataatatagtcgtgaagggattcatcaaactcatcatcgtcattgccgttctcggaggcatctggtttgcctgggaacagtggaaaggaaatgaagccatccaggtggactaccagacagaacctcttgaaaaaggagacctgatgatcaccatcgaagcaaccggcgtcacggagcctgatgaactggtagatgtaggcgcccaggtcagcggaatcatcatggagttcggcaaggacctgaacggcaaggtagtggattattccagccctgtaaaagccggtcagatgctcgcggaaatcgacaagcttcccgtgcagctggacgttcagagggcggaagcctccaaagcgcaggccattgccggaatcgcccgctccaaggcggacatccagcaggccaaagccaagcaccagcaggccagactggaccgggaacgcgcggaaaagctggggcctggggatgccctgtccaaatccagctacgaccagtatattgcggatgaagaaaccgcccgcgccaacgtagccgtggcggaagcctccctgcaggaagcggaagcctccctgaaacaggcggaagccgcgctgaaaaaggaaatgcgcaacctggaatacaccaccatcaagtcccccgtggacggcgtcgtggtcaaacgcctggtcaacataggccaaacagtggtttccagcatgagcgcctccagcctgttttacatcgccacagacctttccaagctgaaaatttgggccgctgtgaacgaggcggacatcggcagcatccgcaaggggcaggaggtactgttcaccgtggacgctttcgctagccgcaaattcaagggaacggtggacaagatacggctggacgcaaccatgacgtccaatgtggtcacttacatcgtggacattgatgtacccaatccggacaagcttcttatcccctatctgacggcaaatgtccaattcgtggtggaggacatacgaaacgctttcctcgtttccaatgcggccctccgcttccgcccggaaacagaactggtcagcgctgaacaaaaagcggcctttgaccggatgcagccggagctggccgcccccgtccgggacggacaaaagaaaaaagccgtggtttgggaattgcggaacaatcttctttatccccacctggtcaccaaaggggaaagcaacggcatgctgacggccattgcgggagaaacgctccgggaaggaatggaaatcgtctctacggctcagatactgaaccgctccgacagttcgggggacggttcttccgcctccgccggcggggaaaacccgttcgcgcccaaaatgcccccgcgccgcaagccgagcacaggcaacacgaaaacggcagcctcggctggcaatgacgggccgcccccgcctccctaacccagggaaccgcctccatccgaccgctcaatcactcttttttaccgcatcaagcattccaacaacgtgatccgcttacgtgacataaccaaggtgtaccacttgggagaaatagaccttcaagtactcaagggcatcaccctggatatcaatgaaggggaattcgtctccctcacgggggcatccggctcaggaaaatcaaccctgatgaatatcctgggctgtctggaccgccctacctcaggccattactatattgccggggaagacgttgccaaattcaacgccgcagaacgcgccactctccggaacaagcgcatcggattcgtcttccagaactttaacctgctctcccgtaccacagccctggaaaacgtgatgatgcctgccgtatatgcccaccccgccctcagcatgaaagccatgcgcgaacgttccgtggaattgctgaatttggtaggcctttccgaccgcatggaccacaccccggcccagctttccggcggacagcagcagcgcgtagccattgcccgttccctcatcaacaaccccagcatcctgctggcggacgaaccaacgggaaacctggactccaccacttccaaggaagtgctgcacatgttcaaggacctgaaccgccaacagggaatcacagtcatcctggtgacgcacgaccccaaaatagccgccttcacggacagggccatcaacatggcggacggccttatctgcgaagggatttccgatatgcttagcaaggacgacgtatgaaattccttcctctccttaaaacctgcatcagggccctggtgcgcaatcccatgcgcgcagccctcaccatcctgggcatcatcatcggcattgccgcagtaatcgccatggtggaaatcggccagggatctacgctccagattaaaaataccatcgcttccatgggggcggacacactgaatatccgccccggagccatctccaaaagcggcgtcaataccggcgcgggcggacgggcttccctgaccaatgcggactgcgaagccattgcgaaggactgccccatggttctgcgggctacccccgtggtgcgcgccagcggccaagtcatttacggcaacaagaactggagcccggaaactgtagagggcggttccgtggaatacctgaaaatcaaaagctggtatgacatggcgcgaggccagcccttctccgaggaagatgtggaacaggccaggcgcgtgtgcgtcattggccagacggtggccaaggaactcttcggggacgaagacccgctgggcaaggatatccgcatcaagaatgtcatgttcaaagtcatcggcatccttcagaaaaaaggggccaacatgatgggacgcgaccaggacgactccatcatcctcccgtggacaagcatccgctaccgcctccagggcctgggcggcggttccaccaccacttccaccggcaacagcaccaccaccttcaaccgggcagataaatacaccgccagttccgtggattactacacggaaactacggaccagccctatacggacgcgccccatccgcggcgcttcaacaatattgattccatcatggctcagatttcagacccggaacgctcctccgaggccattgaccagattacggaagtgatccgtgccaaacacaacctcaaggacggccaactggacgatttccgggtatgggacatggcggaaatgtcccgcgccatgagcagcaccacggaagtgatgaccaatctcctgatgatcgtggccatgatctctctggtcgtcggcggcgtcggcatcatgaatatcatgctcgtttccgtcacggaacggaccaaggaaattggcctgcgcatggcggtgggcgcccgtccgcaggatatcatgcgccagttcctgctggaagcggtgctgctctgcgtggtgggcggcgcgctgggcatcatgctcggcaaggcgatctccatcatcgtcagccgcaccatgaactgggccacggcctcctctccggaagccatggctctggctgtaggcgtctccgtattcatcggcctggccttcggatggtacccctcctggaaggcgtccaagatggaccccattgatgcccttcgccacgaataacaccttactttttatttttccatgtcatccacgttcaaacatctcccccttctggccgcctgtttccttggctcctgcatggtaggccctgatttccggacgccgaccaatgacctccccgccacgtgggaggcgaacaggcccccccacagttcggacaaagatttgcgttcctggtggaatatctttggagacccccagctcaaccacctggtctccacctccctcaacaacaatccggacatgaaggtggctttgctccgcatccgggaggccagggaaaagctccgcgtctcccaggcatccctgcttccctccgcagacgccagcgccgggtggagcctgtccccggacagaggttttcgcagctccacttcccagaacttctccctgggagcgtccacctcctgggaactggacctctttggcggcaaccggcgttccatcgaggcctcccgcgcctccctcatgtccacagaagcttccgcaggagccgtgcgcacagccctgctggcggacgtcgccacggcctactttgactggattaccgcctgcgaacagctccgcatcgccagggaacaactggaaatccaacgcagcaccctcaccattgcggaaaaacgctacaaaacggaattcgccccccgtctggatgtggagcaggccacctccaccgtcgcctccacggaaagccgcatcccgcaactggaagcacaggtggcctcctctaaaaaccagctcgccgtgctgctgggaacatataattcccgtgtagaactgacgctgcccaaagcttccgtctttgagaaaacgcccaccgttccggtaggcctcccctccgaactcctgcggcgcaggcccgacgttatcgccgctgaggcggacctgcacgcggccgtggccaacgtgggcgtagccgtagcggatctgtacccgcgcttcagcctgacgggctccctttccagccgcggcggagatttcggccagctcttcagggaaaacaacaacgcttggtccctgggagggaatctgctccagcccctgttccggggcggagccctgagagccacggtacgcgcccagaaagccgcagcagaacaagctgcggaaacttaccgcaaaacgctcattaccgccgtctccgaggtggaggacgccctgatcgcctatggcagctatacctcccagatgcaatacctacacaaggaaaacaacgccaacagagaagcgttccagctctcccgcaccctgtacatcaacggcgagacggacttcctgaacgtgatcaccgcccagcgttcctggctcagctcggaggaatccctggtcaccatgaagcagaacatccgcaaggccgtggtgcagctcgcgcgcgccctgggcggagggtggtaaccagccgctccctccaaaggccggggtcgccatccccggcaaacggaaccctgatttttcaacaggggacagggcagcaagggaatgactgaagaatcattctttgtccccccacattcagattaaaaaaggccgcaagaataggaacgaataaactatccggaaacttccgatggaattgaacagatagccggggctcaggttaagaacactctccagccacttctttcatgactgcgctgataaggttccgggtcttcacgccgggcagcacgttcaagtccatgcggttcatcgcgtagccgaaggaaaggccgtgggccggatccgcaaaggcatgggaaccgcccgccccggcatgaccgaagccaccggagccgaacagatggcgcagcttgcggcccgtggcggggtctgcgggatcgtgcatgaagccgcaggaaaaggcggtgggcgttttcagcgtcaggtccggcccgtcaatgacgacgttccgcatccagccgcgcacgtcggacgggaatacccggagttcatccagccccaggcaggcctggtagaactgcgccatgccgcgggcggaagccacgccgccaaaggccggaactccggacacccacgcttccggcgtattcatctgccgcacactgttcagccctatcagagtattgaacgcacggtttacgggcgtgcccttgttcatgtattccagataaaacggcgtacccatgttggacatgtccatcttgccgggatacagcgtcgccacgcggttccattcggattccggcaacccgatgtaaaaatccagattcaacggtttgcggatgtattcctcccagtagcgccacaggcgttccccggtcagccgcagcatgagttcatcaagcatcactccgtaagtatgcggatggtagccgtgttccggcggctgccacgccggaacggtttcctccagggcgcgcacgcaatcctcatggtcaaacacgcttgccgtccgggaaaaagccgccaaaccgcattgatgggacatcatctgcgcgatggatgcatagggcagcgggaattcaggccacagttcccccatgctcatctgcggcgaggctccctgctggtgcagggccagcagaagggcgacggatgcggctcccttggtggcggagtaaacgggcaccagcgaatgttccgtccatggacgcgttttatccgctgcggcaaacccggaatgcagggaaacgatctcccttccctccttccagacagaaacggaggcgcccaattctccgtagttacggaaatttttcctgaaaagcttcagttatctgccggtactcattcattcccttaaaatgacccggcgttactcccggcgtccggacaggaaaatactcccctccggctccgaaggcaagctccggcgctgccctggatggtcagcgccggaacaggacaatctgtaaaacatcagtctttcgtatgggcggccaggtatttcctggctcccacttcatccggatcctccttcagatcattcagggagaatttaatacgaaataatctcatgatgaacacataagaacatggaatcagaaaagcgcccaccagtgtagccacccccatgccaatcaccaccaccgtaccgatagcgttgcgcgccaggacgccggaacagcattggactgaaagctatcttcaccatgccctttatcctcgcctcacaggccatctgatgacggttcttcctcccggttcccccatcttggctccatcatagggagggagcctcttcttgccgggcggaccccggagcacgttgctcacggcattgacctttccccggacaatatccgcatcgccgcggaatatacctgaggaatggcccgcatatcaaaaaaggccggccccgcttcgccttctttccagggacaatacgcgcagccgcttttcctctaccttgaatttcacctcccagccagagaacaaaaggccgtaaacccgttccggatcatcctgatactggggacggggatccagggacagcgtatcttccagcgcactcctctcttccggagacatggaaccgccaaaagattcgggaatttccacatccagccgttcataggggacagccgtaaacccttccgacgcttccggaatgcagtccgccagcggaacatagggcttgatatccagaatgggggtgccatccaccaaatccacgccggaaagatgcaataccgggccgtccagaggatgcaattccacccgttccagcctgacggcagacaacccgataggattgggacggaacggcgcacgcgtggcgaacacccccatgcgcacattgccccccagccgcggaggccggaccgtagggctccaccccttacccacgttttcactgaacacccagaccagccacagatgggaaaacccttccagaccacgaacggcatccggatggcggaacggcggctcaaataccagccgcgcccgcgcatccggaaccaggccgctctggcgcggcgcaccgaatttgtccggataacacgtgctgacgtgggcgacgggctgcaagcggagactgatagttaataattaatagctgccggcctttctccatgacgctttcatcagaagcggtggagctgttctccgaacaccacggcatccacttttcccttcaaggtcttgcccaggaatggggtgttgcgggcgcggctgcggagcgtttcatccgtgacgggcgtttctccttccgggtcaaacaccaccagattggccggagccccttcttccagggagacgggggccagccccatcagcctgcggggagcgtcgctgcaggcgcgcaccaccgtctgccaggacatttttccaggttccaccagatactggtaaatagcgggcaggaacgtatccagcgcaatcatgccctgcggggcgacaacgaaatcctgaagtttggaaaacggcgtgcagggcgtgtgatcggaaacaatgcagtcaatggtgccgtcattcacggcggcaatcagggcatccacatccgactggtcgcgcaggggcggcagcgtcttgtagcaggtatcgtaccggcccacgtcctcatgcgtgaacaggagatggtgaagcgccgcttccgcgctcaacccggcggttttccgcttgcagcggcgcaggatatccacgctgctagccgtagagacggtctgcacatgcagggagttgcccgtatccacagaaaggcggatgatggtttccagccctatttcctccgcacaggagggggagcccatcaaccccagacggtaggaagtagtgcccgggtgcatggccgccctggccgtcagggacggcacgtctccgcgcagggcgaaagtaaggttcagattgctggcgtactgcatggcgcggtacagcagcagcatgttgtccggcgcacggtccccgtccgtgatgaaacggacgcccttggcgcgcagggagtcgtaggaggcctgctcctcaccgtcgtctcccttggtcaggcacccggaggggataacctccaccagagcatccgtccggcatatttccatgaacgtggtaatctgggcggcattgtccatcacgggttcggtatccggcatcgccatcagtccggtcactcctccatgaagggcggcggcggtagccgtagccacacgctccttgtcctcccggccgggctggcacaaatgggcatggatgtcgaacaggccgggcagaacaagcttcccggaagcatccagcgccttttccgcggcgctctccaaaagcgttccggcaggagctttcgctgtaatcacccccccggaaaccagaaggtccgccggggcggaaccgtccgtcagccgggcgttgcgaataagtacggaagttttcatgaacaatcagtgctgggtttgcggagtgagatggtaaagcatggacatgcggcaggcgatgccgttttccacctggcggttgatcaggcagcgctcatagtccatcgccaggtcacagatttccacgccgcggttgaccggccccggatgcatgatgtacaggccttcaccggaaatgcgcttcaggcgttcttccgtgacgccgtaaatcttgttgtactcccgggcgctggggaagaaaggggcgtcctgccgctctttttgaacgcgcagcaggtaaattacgtccggcttccaggcaaacgcctcattgaaatcggaaaaacggggaatgccggaatgttcggtgagcggcaccagggaacccggccccaggaaggcgacatccatccccagcctcttcatcagcagggaggtggaacgggccacgcgggaatgcaggatgtcccccacaatcagaacgcgctttcccctcacatccggaaatacctcccggatggtaaaggaatccagcagcgcttgggagggatgggcgtgggctccgtccccggcgttcaccacactggcgcaggtatggcgcgcaatcacgttcggcaagccgctgttgtaatggcgcacgattacataatccactttcatggcctggagcgtggcgatcgtgtcctgtacggattcccctttcaccacggaagaggtggacaccgtgaaattggtcacgtccgcagacaggcgttccgccgctacctcaaaagaggaacgggtgcgggtgctgggttcataaaaaagcgtcagaacggacttgcctttcagggcgggcacctttttgacgcttttggtaaaaagctccttcatcgggccggccgaatccagcagcgtgtgaatttcctcgtcagtcaatgaggagatattaagaagatccttgcggggatgattcatgggaaacggagaatggattggaaaattttcagtgggagggaatgaccacgctgtcctcgccgtcagcctccttcatgcttacgatgaccttggctccggcatggtccagcacgtgacccgtataatccggctggatgggaacttcccgcccgccgcggtcaatcaggcacgccagttcaatacgggccggacggccgtagtcgaaaagggcgttcagggctgcacgtatggtgcgccccgtataaaggacgtcgtccaccagcacgaccctcatgtcatccgtggaaaacggcaaattggaggaacggagggaaggccgggcttccagcttgaagatgtcatcccggtacagggaaatatcaatagagccgtactgggcttccactcccagctcctttaccttgtccaccagacgccgggcaatcacatccccctggctgagcaggccgacgatggcgagaggttctccggggaaacgggccacaatgccgtgggccatgcgctcaagcgcacgggaaattcccggaccgtccaatacgatttcctgtgaaggaggagtcatttgccggatgggggaaaaagttcacgttacagccccgccagttttaaaatgcggtgggcggccatggcggcattgacgggggttttcttatgtaagccaaccgtagtgcagggcacgccgccgggacactgggcaatcgccagcagggcgtcaataccgttcagggggcctccggggaccggcacgccgataaccgggagggaacagctcatcaccaccacaccgggaagggcggcggacaggccggccacagccaggataaccgctttttctccgctggcttccaaatcccccaggaacctgatcagctccggaaggtcgcggtgggcggacagaacggtttcttcataaggaacattctcctgagcaaaatactcgcgagccggttccataaagggcttatcattcgggctgccgtagatgacgatgactttcatggctgtgtatgcggttgtgaaacttgcagattatgcccccaagccccctgccctggcaagacttaacctgcaaaaaaaggaaggccccgggtggaaatgaacaacgggagaaaggaaacacaggagttccggaaccgttccgggaaattggcccggcatcccggtcattcctccaacccagattcgcccatccctccgccctctccgggaaccttcagttttccggagaggatatccttcctgatacggtaaagagccttcaacctttccttatcatccaatccttccgtttcccgcatcaggtataaagaaaactgtacggaacaattctccagccgatatttttccagaatgctcccccccattttcatgtattggcctccgtactttccgtaagcgttctgaatttcatcggcagtcatcttctctctttccacccgttccagcaatttcccggactccctaatcatcttcagatgcatggcgcggtaatcggaagggcatttatccagaatcccagcccattcgggagattgaatatatttcagcgtggccaccagcaccgcacgattatccttttcctccaactccacaatgcacgtccaaataatgcccagctgcaaatgcttggccatggcctccctgtacgccgctattttcttttcatcctccatttccaaatccacattagccatggagggcgccgctatatcctgggacatgccggaaaaagtcatcaaaaacgcagggagaattccccaccggaacagatttgacatgaaatcacgttacaggaatcttttgcgcagggtcaacaatattcttcccttccgccgcatcccgcagcattgacggccgtcgccacggcggactgtctttccttcccggaaaaaacaagcctgcccccattcccggcttgatggcatccggttccggcataacaaggctcacaggggcgtatcttcatccagaaacgcagaaaaactgcatcgctccggcggccggacgcttgaaaaaacctagcgggtcgcctgctgcgccatggcctccgcacaacggcgtccgtccagggcggcggaaacaatgccgccggcgtaacccgccccttcgccgcatgggtacaggccctccagaccgggatgttccagcgtggcggggtcccttggaatgcgcacgggggagctggtgcgcgtctcacagccaatgagctgagcgtccgttccggcaaatccccgccatttacggtcaaactgccgcagcccctcccgcatgcgccagacaatcccttccgggagcaattcatgaaggggatgggatacgatgccgggatgatagctggtaggcagcagggaagaagaagcgcgccctttcagaaaatcctccaccttctgggccggggctttctgcatgcctcctccggcacggcaggaagccgtctccagcgctttctggtacgccacgcccgccagcaccccgtgttccctgcaaaacggttccgtatcttccggatgcacgctgactacaaaaccggcattggcaaatggagaatccctccgggccagagacatgccgttgaccactacctcatcgttctccgtggcggcgggcacgatgaagccgccgggacacatgcagaaggaatggacgccgcggtcctggatggtggtcgtcacggaataacgggctgccggaagctgctccgggcgcctctgctccggattcaggtggtactggcgcgcatcaacaaacgcctggggatgctcaatgcgcacacccacggcaaaggatttctgttccagagccagcccctccgccagcatcatgcggtacacgtcccgggcactgtgcccggtagccagcaaaacggaatccgccgcaaattcccggccatccgcgcaggccacgccccgtatgcggcggccgtccgcagaacggagcagatgctccacacgggcattgaaatgaatttccccgcccgcgcgaaggatggattccctgatggctttgacgacattgggcaacagattggagccgatatgcggatgggcgtccgttaaaatttccctgggcgctccgtgggctacaaaaatctcgtaaacctcccggacggggcctctcttggtcgcgcgcgtaaacagcttcccgtcggaaaacgtgcctgcccctccctctccaaaacagtaattggaatcctccatcaccgtgccgcggcgcaggatgggagccaggtcaaatcggcgggaggaaacatccttcccccgttccagaaccacaggcttcatacccagttccaaacagcggagcgcggcgaacatcccggccggtccgaacccaacgatcagcgccacgggggagccgggacggacggacggataatcccgggagggaagacgttccggcggcagcgggctatccaccccgaccagcagccgaagctggaagagaatttttttctgccgggaatcaatggactccttcaccagccgcacatctttgatacgggagggggaaatacccagcttccgcgccacggcagcgcggcacgcgcgctcgctgccggccttttccatcggcagaatcacatccaccgttattccttcccctccgctcacagtccctccttccccggccggggctgctgctgggtgatgcagtggatggcgccgccttccagcaccagcttgcgggcatccacccctattacctgttttccgctgaaacattcacgcaaaatgcccagggcgcgatcgtcattccggggctggttgaatacgggaacaatgacggcctcattaacaatgaggaaattggcgtaactggcagggagctgatccaggcgccagtcctccgcatggaggggatccggcatcggcaggggaatcacctccaccccggaaccgtccacgcatctcaaatcctgaaggcgttcattattctccgccagagcgcggtaatggggagaggaagaatccgtttccacgatggagactacggcatcccggcacacaaaacgcaccatgtcgtcaatatggccgtccgtatcatccccttcaatgccggaaccgagccagaaaacggctctgacgcccagcatgcgcttcaattcctcctcaatcatggcccggctccaatccggattgcggttgggattcagcagcacggactccgtcgtcaccagcaagccgtccccattgccctcaatcgcccccccttccagaatcagggaagaactgcgcacgggaagccccagcgccgccccaatcagggtgggaacgccgttgtccaggtcccacggggcaaatttgccgccccacgcattaaattgccaatccgccagcatcagagaaccgtccttcacatcctggacgaaaacggggccgtggtcccggcaccatacgtcgttggtcgggtggttgaacaggcggaattgctcctcactcattccggcggccagcatcgcctgcctgacgccgggatgaaggggagctgcggcattcacgcatacaagggcatgcggagcaatggcagcggccacgctcccataagtctgctgcaactcgtccagccccccttgccataaatccctgcggtggggccaggacagccagacagcatcctgaggctcccattcagcgggccagcgtacatcgggttccttgttcatggcggtatcgggcggttcaactgggctggtcctgaaattcataaggttcttcaaaagccttgcggaagctcatgaagcccttgaaatcatccagggaatcctccggctgtttggaaaaaacgtcttcctcaatcagtaaaaaaaccatctcccccacattcttcccgttcctaagcccccattccttcatcacggtggaagccatgggcccgaactgggcgagggcgtaatcccggaacccttccagcagttcctgcccgctgacatgcctctgagagccgttttccctttcttcaacgcgctgcatggtaaaatccagcgcatctttcagaaaagaatacgcccgttccgcaaaacggggatccttccgtacgatacggctcacggcatcttcaaacataggggtggtcatagcggctcgccactaccctatacagccccttgtgaaaatcaagatttttgggagcgctccagcttcagccctcccttggggacagcatggggaaaatgaaggcagccgccccctcgctggaacggaacgccggacgcggcagacggcaaaattcccgtccatgatatagagcctcaaaaaacgcacgcgcccgcattttgaatatcatgcttctgcatgagcgaccctccggcaggcagcggtttttacgttctgatgccgtcaaaaagccctgtaagcaggaaggaaaccttgccagcctatggtctgtttgttatgaacggaatactttatgttccgttcctccatcatgcttctggcaaccatgctgtgcgtttcctgcgtatcgcaccggcctatccaggacagcagctccccgcccattgacgcggccaatcccctggacggcacccccgtggcgctggcgtggagctccggaacgcaattaatgatgggcgtagacacgggagcagtccagacatccctgcttttctccccggcagtggaatccatcggcgcacgcctgcgcggcaggggcgccatgcgcacggccaacgtgcctgtttccctgaaggatgacggggaacccatttcccggaaacaggacgtagtaatggcagaccaggccccgtatgacggtttgctgggctgggaatgcatccggaaatatgtgtggaacatcaactatcccaaacgctcccaccgttttttcaataaacttccctccagaataaaaagctggaacaagctttccctgattcccgggtccgactatccgcaaatcgcggacaggcacggaaggcgcatcattctggacacgggagccccccacgccgtttacatctccaaaaaacgctggaatgccattaagcaggcctacccggatgcgttcgtcagcgtctattccggctacagccccgccgcaggcggctttcacgcccacgaatgcatgcatgtaagctccttccagctcggtccactggaattaaaaaatatcttgctctgtgaaagcttcgccaacccggaagtgatgggcatccccgatgacatcgacatcatcctgggctacggcgctctggccgcacgccagttctggctggacggcccggggaacgccctttatttcagctccaccagccaccggatgcccgcccccgcctccttcaacctgatgggaggcacctttatccaggacagcaacgggaacggccccatgaaagcttacgtggcagagtggtcgcccgcatgggacgccagcctcagaacgggagatgtgcttatttccatcaatggaagaaagaatccctatccggacctcgtagaatatgttaccacccagcggggggctcaggccagcgtggtggtccagcgcaggaacaggctggtgcgcatccaatgggaagttccggccgcgccccctgccggggattattaccccacgccccaggccattacggaacaggaattcgaaaaccacgtcaggcagcaggaaaaaaaagaacagacccagccctccgcagacggccagcagcctccggctacggccggagaaactccggatgaagcctctcccgcagctgacgggaaaacggacaaggcctccgctgcctgagccgggccagcaaccagccatctctctacaccggcatgaacaacgaacaacatcagaatacccaaacttccgccgcccccgccattccctcccccttccagaagaaaacctgctggcatgccctgacaggcgtatccattctggtgatgctgggcattgcggccttcgtcatttttgaagtggtggaacttctggggtttctggaaccggtgctcctgcccatcctgattgccgccgtcgtggcgtatttgctggaacccatcgtttcctggctggtgcgtctcaaattctcccgtccatgggcagtagtcacggtcatgtttgcggctctggccgttctggtaggctttggagccacgattctccctcccctgatcaggcagacggatgaactgatcgacaaccggatggagctatgggacaaaacctccgaactgattgactccaccattgaaatccccttcatttcccgcaccattgacagtgtttacagcaccagcctgcgggaactgaatgccagccattatacggaagcggaagtccatgacctgagaaacgcccggaccgcccgggaaaagctgggagcctacatgaccatcaattcctccttttaccaggacaagctgatgagctggctcacttccgggggacgggccctgtacagcaccataggaatcatggtcagcatcctgatcacgcccattttcgctttttactttctgctggaggcggataaaatcaaagagaaatggcccagcatcctgcccctgaaagtctccaaattcagaaaagacgtggtggacaccatggaggaaatcaacggctacctgatttccttcttccgcggccaaatgctggtaagcatcattgaaggcattctgattgccatctgcctgaagctgataggcctgccgtacgccatcaccattggcgccgcggtctgcgtgctgggcatcgttccctacctgggcatcatcaccgccttcatccctgcggtgctgctggcctggttcacatggggggatttccagcacgtgctgattgtttcgggcatcttcctggccgtcaaccaatttgacggatggatcatccagccgaaaatcgtgggggattccgtggaactccacccgctcacggtcatgttttccgtgctgatctggacactcatcctgggcggcttgatcggcgccctgctggctgtccccctgacagccgccatcaaggtcctttacaagcggtacatctggcagaatgccagcatgcgccccatgacggaacccgtgcttccgccggaacatcccggcgaacagcctccggccccccccgaaggttcggcccacgcttaaacagcggcatccttccggccgtcctttccggaaaattataatcacacacacccgacaacatgaataaatccgcattacacctgatgcttgccatcgcggcggcagcggcctgcccggccgcagtcacgccaacggtcaacccccccaaggccatcgtcatgatttacgctgacgacctcggctatggagacgtaggctgctatggagccaagggaattcccacccccgccatcgacaagcttgccgagcagggctgccgcttcacggacgcctattccaccacatccgtctgcaccccttcccgctatgccctgttcacaggggaatatccgtggcgcaaggaaggcacgggcatcctgccgggagacgccgccctcattatcgataccaagaagcccaccctgcccaagatgctccaatcccacggctacaaaacctacatgataggcaaatggcacctgggcctgggggaaaaggggaagaagattgactggaacaaacatatctcccccagcccgaacgaaatcggatttgacgagagctttatcttcgccgctacgggcgaccgcgttccctgcgtgattctggaaaacggcaatgtccgcaacctggacccgaacgaccccattgaagtatcctacaagcacaacttccccgggcttcccaatggcaaggacaataaagaccagctcaaactcatgtggagccacggacacaaccaggccattatcaatggaatcggacgcatcgggttcatgaagggcggcaaaagcgccttgtggaaggatgaggaaaacgccgatgtcattacggataaggccattgaatacattcagaagagcgccaaagccaaggaaccgtttttcctgatgttcgccacgcatgacatccacgtgccgcgctgcccggaaaaacgctttgtgggcaagagccagcacggcgtacgcggtgacgtgaccgtggaactggatgactgtgtgcgccgcattacagaggctctgcaacaggccggtctggaaaaagacgccctggtgatcttctccagcgacaacggccccgtgctggatgacggctacagggatttcgccgtccgggacaacgccacccattccccctgcggccccttccgcgcaggcaaatacagcattctggaaggaggttcccgcattccgttcatcgtcaaatggcccggcgtgatcaaacccggaaccacgagcaaagccctgctcaaccagatggatctgggagcctccctggaacaactgctggcccccggcaaggccaattccttccgcgactctgaaaacgtgatgcccgcccttctgggcaaatccgccaaggggcgtgactaccatgtcatcaacagcaccggcaaggcgttggcgattcgccacggcaaatggaaattcattcccgccggcgtggccattcgcgacggcatcaacggagcctccgcaaaaatgagcaagtccccggaaggaggaagcctctttgacctggaaaaagacccgaaggaacttgacaacgtagccgcccagcatccggacgtttgcgaacagatgaaagccaagcttgaggaaatccgccagaggcccgaaaccaaggctgaccaggaggatctgcttcccttggacgactaacatccattcgggccagatcatgagagaatccgccacatgctcccaatgcggccacgggtacacctacccggccggactggacgccaaaaccggcatgcgctgcccggcgtgcggcgttctgattcacgttacaacggggcttcccttcggggaagcctcctcttcgccatccggccgcaaaccggaaaacgccatgaaaacgcagccctccctgcctcccgtcaggaaaaagcggccgtctttctccggacgcgatactgacgaacgcggcatccggcaggaaaacctgccgcagcggccagccgcagcatccggccgccggattcccgctacatcatggctggcatgggggctgtccctgatagcgttgatcctggcctttattttcccctcctacggaaacggttccacagatccgctgtacatgcttcagtgcctgccctccatggtattcggctgcgctgcggccatccttttcatccagggtctggcggctttgcgccgctaaaaaacaaagcctgcggccccagccggggcccatgcggcagccccgtcccaaagacggccggaatgcctggtttccatgaccctttccgcggaaccgggcttttaggcttgcctgtcaaatgaacagattttaagttacgtcccggtaaacgttatggaacgggaggcagaggcaaaggataacctgtggagggccagattggatgccatcctgatgcacaggatatggggttcccttattttcctgggcatcgtttatatcattttcttcctgagtttcgctatcggtgatcctctggtcaggctcatccagacgggcacccagctgttcagcgtctgggcctgccgcatgctggaaccgtggccccgccttcaatccctgctgggggaaggcgtggtaggaggcgtgggcggcgtactggcctttctgcccaacgtggttctcctcttcggggccattaccgttctggaaaacagcggatacatgatgagggtttcccgcctgatgagccgcatcatgaaaatcatggggttgaacggcagcagctttgcccccctcctgctgggattcggctgttcggttcccgccattctgtccaccaggagaattgaaacgcgcagcgaccgcctggtcaccatcgccgtgctgcccatgatgagctgtgcgggccgcctgccgatctacatgatgttcgtctccgccctgtttccctcccgcctacaggcccccgtgctgttcgggatttatgccagcggcgtcctgctggcgctgtgctgcgcccggcttctgaaaaacacgcttttcaaggcgccccagagggattccctccaccacatgaagcgcctgcgcctcccctccctgcggaaggtgggcatcctgatgtggtcacgggccttcatgtacgtccggaaagcaggcactttcattcttggggcctccatcatcctgtggtttctgaacacctaccccaggccggaagaaaacacggcgccgacaaacgcagcggccatggaacattcctacgccggacaaataggccattggatggaacccgtcacgcaagtggccggatttgactggaaaatcaattccgccctggtaggagcctttgccgccaaggaaattttcgtcacccagatgggtatcctttatgcggtggaagacggaaattcgggcccggcggcccagaagacattgaacgcccgccttaaagccagctacacccctctccagggcatcagcatcatgatattctgcctgatcgccctgccctgcatcggcaccgtcaccgtcgccaagagggaagcgggcacctggtggttcgctctggctcaattcggcggattgaccctcctgggttttgcaacggctacgctgatctaccaggcagggctccttctgtaagggccagccataaagaaaccggaagcagggaatacccccccggaggaagaaaaaatgaacctcgtggaaaaagaggcgtttacgatgaacttccgcaagttctcctgctctacggtcaatctatcacaacctcgccatcatccgaccacgaaagccgcagcataacaccatgcatggccgtgcaaacctcccctccgcaacaatccggaatcagtatgcatcggctgaagcctttcctgtttttttcaagccgcccgggtatccttttccgtttgcagagggggggaacaacctgcggcaaaaaaagatcatgcagccatttccggaaaatcaatgcccttttgacagggagtaatcaaaaaaggggcaccaattatccattcggtaatctttgccctggatatgggccttaacctcatctccctgggaatccctcagacagccccgcgcccccgtccgcggaccggaaggacggtgttcattaatcgtcatcccatagcgtagacgccctttccccgggtccttctccgtcaacagctgtaccgcattcttccccaccagccggacagacttgatggcaatatcctctccctcagcccccacaagggaaaaaccataattgccaggatcgtcaaccgtcttcgtgtccagaaccaaaggggggcagggagcataaaatgccacttccaccgtccaaccctttccggacttcctgattttatgggtcaggggatgcacgggtttccagtccgccccatccaacaggactttcttcatgacatagcccacatactccccataaaggcgggacatgggcgccgtcaaatggactccgtcgctatactcgaaatgatacatcggggtcgtcatcacataccggctgtccttctccaaagccatctccagctgttccagagcaatagccggataatccgtaggattaaactgataataattcaaatgggaaccaacctgatagccgaaacagaccacatcgtttttctgcccggtcacggccctggcgtcatgatttatgtccctgatcagcttttccattttttcccggtaccattccctcgtttttctgtcctggtgatccgtctctccctgggtccagataaacgcaggcatggaaagggtcttcccttcccggtcagccagtattttggcggccttcaaatcatccaaaatgcggttgtaggctccagttcccctgcccagggaaccaaggctcgccccacccactcccgtcgcagaacaaatcaaccagatacgggaagccgtaacgggagaataatgctgcatcaggcgaaacaaacgacaggcagccccggatacgggagtttcgccgcgcggaccgttcactccttcctccagaggaaccagcatcttgcggtcactgccgttctcatacgctctcacccctcccctgaacatatacaagcccccttcctcctgcttttccgttacaacgggcttagccgtccagcccacagaaagggattgaccgtaagaagttaaataattccaatccgcccactctgttttccgggaagcacagatggatgcggaagccgccgcagccatgtggaaaacaagcaaaatcaaggtaacaggaatattcatcagataattcaacggactctgtccgtgaacatacgttagccgttccctctttttatcaattcctgaacacaaagctgtccatccattgctgcagtaccattacgccaggaaatacggaattgccgttccagccgggtccacgccatgtttcggtatcatgccgtaccggcaggaaaacgcattcaatataccgacgggattttttatcctccaaaagaaaggcggcagaaatattccccgtattgcataaacaacatgaatcatttcccgtctatcaacgccatatccgcctccatctgccttctgggatgcggactcgccctgcctgttttctcccaacagccggaaaaaggaaaacccgatgccgcccacatttccagaacaaaagctgactggtggagccagaggcacgccctgttaaagcagaccctgacggaaacaccatgccaactgctgtttatcggcgattccatcacccaccgctgggaaaccgacggcaaaaaaatatggtctcaatatttttccccctatgctcctgtcaatttcggcataggaggcgacaggacggaacatgtattgtggcgcattgacgattctgcccttaaaacgcctcattccccccaagtatgcgttatcatggtgggcaccaataacacggggcaatacaaaggcaggcagaccccgcaggaaacggcggagggtatccgggaaatagcttcccgggtccatcggctccaccccgccactgaaatcattcttctgcacatctttccccgggggaaaacggcggaagaccccctgcgcatccaaaatgaaatgatcaacagggagctggacaaaacaaatatgccgagagtccatgtcgtcaacattaattccgcattcctggacaaggacggcactttcctgccgggaattaccggggacctcgtccaccttacagaaaaaggctaccgtctctgggcggacgcactgctgccggaaatcaaaaaatacatgaagtaagtccgctaccccctcccgcccggctcaacggccaattcggcctcatctgcgcagaagcggccagccaatcatggttgtcactcccgcacataaaaaaccggagggattattttccctccggttttcggatacggccgttaaaaccgtttaaattgtcttaatcacggaagagtcgtcatcatccctgtcctcggcagaagcggccttcctggtgggaacaggcgtcttcctgaccttttccagagccttgtccaccgccgcaatcaccttgtcttccccggtcttctgactggacaactcattataaattttttccttggcctcataatcggccttggctgccgcatcgccgggattggccttgaacttgtcctccgccttgaacaaggcctcctccgcagcctggaactttggttccaccgcgtttctctggtcttccgcagtctgcttgatgcggcccagcaggcgaattacatacgggcggttgctgagcctcttgaatgcggaaaccagaaactggcggcgttcgctggttttagcatccgcaataagggggtcaaacaacttgagcgtggcgttgtcatcccggtcacggtccacggagagtacgcggagaatggaatcatgggcctgggaacgcacgcgttcatgcagggattcgtctttccaagccttgaacaggtacggaacggcgtcatccgtattccagtccccccaagcggtaatgatggcaagcgcctttttgggatcctccttatagctcttttccatcatgtccagcaccttgggatcaccggtgcgggccagcagcttgtagagcattttgacgttttcctccggcatgtctttctgatactggagcagtttggaggaaagcgccttgcgcttggctggaggagcttcgtcaatcaggtagcgcgccgtacggaaagcggaggaaatcaaatccggggaagcatccttcttctggaggatcttcatcacgtcgtcaaggtcgtccagcttcatggcaaaacgcatgtacttgagcaccacggcctgcttgtcctggatcttcttattcttgctttcgctgatggaagcgtacaggtctttcagcatgtcgcgcatggcggggctggaagacttggccaagagggttaccatcatggaatatttttccttactgtacctgccgacattttttttcatgtcttccaccacctggcgggcaatgttgtcatccatctgggccatgatggaaaccaggtgggcggcgccgggccagttttccctgttgcccttgactcctctcacattggcgagcagcagagcggcatcctccgcgtcgggaacgactttcacatccgggacacggctgagattcttggagtcaaacagacggctgcggcccagtttcccgccttccacgaccagcgcattcaggcgggcgttctcaccttccaccttttctttcttgctgttggtgctccatgcataaatccctacgcaagcagcgatgacaaccaaagcgcataccccataaataacaccccgcagcagggatttggatttatccacggaagcggccatatcccgggcggattccgttccggcgggaggctgaataccgccgtcgcccgccggaggagcgccagcggcaggggaaactccctcggcggccacaggctggggaaccgcagcgggagccacggaagaagctggtgctgcccccacgggggattttaatactttcagcttgggaacggcgctttccggagcggcggccggggatttctccgccgcagcgggagccgcggccgtcttgaaaactttcaatttgggagccccccccgcaggagcaggctccggaacagacggttccggggtctgcacagccgcaggcgctacccctgcggcctgggccagagcagcggcctgagcctccgccagggctttctgggcctccgctaccttggcaagggcatcctgaatctgtgcgtccacggaaggctcgggctgcggagcggaagcggcttcctttttctccaactccgccgcaaggcgcgctctttcctcttcggcagctacacgggcggcctccttttctgcggcaatgcgcgcggcttcggcagcctcctgctccgccttgattcttgcggcttcctgctcggcagctattctcgccgcctccttttcggcagcaatacgggcggcttcctgctcggcagccgctttttccgcagcaatcctgtccgcctccgcctgttccgctgcgcggcgggcggcttcctcctgctcctgagccagcttggcctgcaactcaggagtgagaaaacgcggcttgacaacctccacgccttccgcggcgggagaaacaaactttaccttgggtgcggccgcaggggctgccgttaccaaacggcgtcgcaatttgggaggttccggcgaagaaggggttcctgtctgatcggtcatcgtgataaaatggctgggaaattggagtgattttatacgattccgcggccccctgcaacctcaaaataccgtctggaaaacgggcggggaacagccgccgtgcgtggttcaacaggcagattgcgaaaaaaggcttcacccgagatataacatggaaaagcgtttaaatatcccgcgtattctcccgcaaaatcataaaaaacacaatatgttaacaacaacaatcatgaataaagtaaagcgcccgtaatagaacttcaagaatacgtaccagtcatttaagaattctcttaaaaaatgttataacacatatacttttttcttgccagaccaaggatgattagttaaataaataaccactcgtcaacatcatgaattccaacgacagtaccaaaaataagaggcgctacacgcctgaagaaaaacaatccgttcttgatttcattgctgaacggaaaacccaaaacaaaaggggtgcccagaaagaagccgccgaacgcttcggcatcagcacggtgaccatctcaagctggatgaaggcatccaaggccaagcgcggccgcaagcccggcaccaaaaatacaactgctcccaaaacacagcctctcgcagccgcccaacccgccgacctgcgccgcctggcggccgttctggaagaaatcgccgaccttgaagcccagacagccaaactcgacgccctgcgcgctgaagcggaggaactcaagaacaggctgactgccaagcaggcctgattgcttttattccttccttttccggaaaaccggcttcccctgacaagggaagccggttattttctttacggagatcgcgcttgccccctcggaacaattcctttaatatccgccgtcgtgactcaacccgcccacattgctcccgcgagtcagtctgtggaaggcatgtatgccgactactttctggattacgcctcgtatgtcattctggaacgggccgtacccaagatcaatgacgggtttaaacctgtgcagcgccgtattctgcacgccatggaccgcctggacgacgggcgttataataaagtggctaatatcgtgggagacacgatgaaattccatccgcacggcgaccgttccattgcagacgcgctggtggggctgggacaaaaagggctgcttatcgacacgcaggggaactggggcaatattctgacaggcgaccccgcagcggcttcccgctatattgaagcccgctttacctcctttgcgcgtgatgtagtattcagccccaaagtcacggaatggcagctctcctatgacggcaggaacaaggaaccggtcagccttcccgtcaaatttcccctgcttctcgctcagggagcagaaggcatcgccgtggggctttccagtaaaattcttccccacaacttcaatgagttgattgaagcctccatcgcctacttgcgcggccagcccttccagcttctgccggactttccgaccggaggcgtgatggatgccaccaactaccgtgacggagaacgcgggacgggccgcgtccgcatcagggcgcgcatcctcacggaatcgaagaaacttctccgcatcacggaaatcccgttcggcgtcaccacggaaatcttaattgattccattgtctccgctgcggaaaagggaaaaattaaaatcgcccgcattgaggacaatacggcccagcatgtggacatcctggtccatctcccggccggagcggatccggagcagacgaggaaagccctgtttgccttctccgcctgtgaagtcagcatctccccgaatgcctgcgtcattgtggaggaaaaacccaggttcatgtgtgtcagcgacatcctgcgctacaatacggactccaccaaggaaatcctgcgccaggagcaggaaatccgactcaaggaactgaacgaggcgtggcaccaggcaagcctggaaaaaatattcattgaaaaccgcatctacctctccatagaagattccgaaacgtgggaagaagtgctcggcaccattgaccgggaattgcagccgtttgcatcccggctgcgcgcccccattaccagggacgacctggtaaggctgacggaaatcaaaatcaagcggatttccaaatttgacgctttcaaggcggaccagcacatccgccagcttgaagaggacatcgaacaaacgcagaagaacctcaaccagcttaccaaattcactatccgctggtttgaagccctgcgtaaaaaatacggcgccgcctatccgcggaaaacggaaatttcctccttcggctccgtaaaccgcgcgcaggtggctgtcgccaatgaaacattgtatattgatgacgaaggctttgccggttacggcgtcaagaagggaaaccctgtctgcaaatgctccacgctggatgacgtgttgatcattgacaatgcaggcgtgctcaaaatcgtgcggattcaggacaaatttttcgctggtaaaaatcccctttatatttccgtcatcaaaaaaggggacgaccccgtgttcaacctgatttaccgtgacggaaaagacggccccgtgtacgccaagcgtttccgcataggagggttcaccagggacaaggaatatccgcttacccgaggcgcaaagggaacgcgcatcttccacttctccgtgcatgaaacggaggaaaacagttcccagataagcgtaaacgtttatctgaaagccgttctgaaactccgtaacctgatcaggcccttccacttcgcggacctgagaatcaaaaaccgcggcgcccagggaaatatcattaccaggcatcctgtggaacgcgtctcccgcatcatgcctccggccaagtccggaaatgaggaaacggaagggccaacaaccgctccttccgcaacagcggaacggacggaaggctcacccgccccctccgcggaaacgctgcatcctgaaacagccccacatttggaggaaccgcctgccgatccgccgctggaacagggctccctgtttgactcctgaaacgttttcaatctcttaaaatggaaatatccatgcctgactatccattttcggcttgccacaacgggccatcttctgtagatatgggccacctcattaccatgccgctttagctcagtggtagagcacccgccttgtaagcggacggtcgtcagttcaaatctgacaagcggctccatcataacccgctcaaggtcaatccttgagcgggttgcttttatgaggcgtgcgccattactcgttcccatgaatttccggcgtgccgcttttgaacattcatcatccattcatatctccggcggaatgcggcagccgcaggaagcaaagcggacacaacatctggcaagaggccattccacccacgggcatccccgtcaacttccggcagcgaagggtcattcccggagcgggaagaaggttccgttggcgataacgccgcctcagcaagccgtttccccccttgaatacgcctccattgccgtttcgaccaagggaaccatgattcaagccaatggatactacagaaagaaagatggccgcggctatcctccggtttgaagacagccgtgttaccgggccgtattccctgcgcgtttcccgccttcccgccgccgacaagggcggcaagtgggagatttgcggcatttgcgacggcattgaaccggccgtgtttaacagattgaaggccctgttggatgccggaagacgtgaagaggcctgggaaggttgcctgcaatacgtcctggataataccgccgccgtgcgttcctggctgggttctgacgcttttccggccacggagtttatgttgcgggaccatttttttaattccgggagcaggaataccgggaagattttgcagcgcgcgctgaatgtccacggcgccgggcttgtggtggacggcatcccgggaaaacaaacccggcagatgttgaaaaccgttctcgcccaaacgggagagtccgaatttctctccactctgaacgaacggcgcaaatcattttaccattcttgcaaacagttccccgtgttcggcaaaggatggctgaaccgcagcaatgaggcataccggttcgcacaatccctggtttagggaagttcctgcaaaaaaactcccggaaaaggagtgcaggagaattcaaccattgttgcagcaacctgtttccatgcgccggatgccatgaaagagcctccgtgcagacatccgcacggaggctctttcattaacacgatcaggaaaacgcttcgtcccccacaaacgctcccagcagacggcaaaaccgggaagcaggtaattttaccaatctcccgtccccccgcttgccatgctgggtcagaatccagggcagggaaagaatctcccgtttataagccagcaattcccgtacatctcccgccagaaaatggagatgccaggcatcacaccggaccggctcaaaccggaagcggacatcgacaatctttccgaaagatgcggaggaatccaccctgcgcgccatcaggacaagctccggagtacggacatagacatcctggcggcggccgtcttcctccatttcctccaccctccggcctgcagccagataataggaaaaggcggcagataaagcgttcatacccagtttttcttatgccgcctcaaccgctggcgcaccggacgattcccgtcggaacggctcctgaagaaccgtttttccctaaaaccgccggagcaaaagatcggacggcacccagtcatttgccctgccggattttctggataaccggaggcatctccgttttcggctgtttctggaagcaggacaaatgccccggttccagcaccaggcaggaatcgtccctgcatatctccgcccgctctgcagtcacgtctacggtatacccgcagccggagaggagagaagacgccgcataagccgctccggccagaaccacccacaagagacgttcccaccaggtcaatccgggacgtgttccgcttttttcataagcgtttttcatgccctgttttcctgcctccagagccgcttttttttgttcttctgtcaaattgaagtccatttgagagagggggtgaggggttccaggaattctcgcgcatgttgtgccgcaacggttccgcgggaaaaaatggcgccgcggcaggactgtttattgctattcattttgttcatttttttgttcattgcccggaaacgggcctttaccggcatggaaccggcggtgacatcagaccgctcccggatacagacatccttgccctgcccttggggcgggagcaacacgcctgatacgtccgggaacaaggaatattccgccagagacaaacgccggaatttccgccgcggataacaaataccctgttgaaaacggaaccggttcatgctagtctcttccctgctatggcaaaaccggctctggggaaaggctttgacgcccttatcaatcaaaatctgtctcgtgaatccttggcggctccccaggcgggagacgttgtgcatcaactatcccatgccgccattattcccagctccctgcagccgcgcgccattttcacgccggaacaactggcagaacttgtagattccatcaaggaacacggcatcatccagcctttaatcgtccgtaaaacgcaaagcggcaaatatgaactgattgccggggaaaggcgctggagagcctccggcatcctggggctgtccaccgtacccgccatcatccgggaagcttccgacaaggacgtgctggaactggccctgattgaaaatctccagcgagaaaacctcagcccgctggaagaagccgcttactacatgcgcctgaaaacggagttccgcatgaagcagggggacatcgccaagcgcgtaggcaaatcccgcgccgccgtggccaacagcatgcggctgctcgacctgcctcaaccggttcaggacatgctgggcaatacctttatcagcgtagggcatgccaaggtacttctctccctcaaaaacaaggaccagcaaatccagcttgggcgcgacatcgtcaacaagggctacaccgtccgccagacggagaaggctattcagaagatgctcaacccgccggagccggctcccgttaaaaaaccgtcctcccctcaatataagaaaatttccagcatcctcgccaaacaattcggtactccggtgaacatttccggccagggaagccgggggtccattgaaatcaccttctccagcaaagcggaattcatccgcatccttgagcttctgggccaggatgaatggcctgattccaagtaaacttcctccccctttttccatgacgccccgcatcggacttctcctgttcacggccctgctgatgcagtgcgaaaaccccgtggaaacgcccgtgcccggtaaggaaaccgttcccgcgcaaatccggcaaacggattgtttcaacggaggaaacgctctgttccacgctgcgcggataacggaaatggggaaccgggcttcaggcactcccggctaccgcaggcagatggactacctgaaggaggaactggccaaatgcggctggacctgccgggaacaggcttttgaaaaggaaacgccccagggccccgtccggttcgtcaacctgagggcccgttttggcaaggctccaaacttcctggatccggttcggggcctgctgacctgccacattgacaccaagcggggcatcgacggattcaccggcgccaatgacggggcatcgggagctgcggccattctggagacagcccgcattctgtccggagaccccgcacgcgccggaaatttggagcttgtgttttttgacggggaagaaagttttgcggaacatatggacagcgacgacggcctgtacggctccaggcattacgcatcctccatgcggcagccgctccccgaatggatgatcaatttggacatggtggggcggcagggtaaaaagatacgcatcccggccatgacgccccaatccatgtaccgggtttattcccgcgccatccgtgaactgggttattccccagaggaatggggagtatccggctatgccatcctggatgaccacgttcctttcatggagcgcggcgtggacacgctgaacctgattgacgacttccaggacggcaactggtggcacacctccaaggataacatcggcattctgggcgaaaaatccttccagcaaaccggggaaatgacccttcacatcctccggcaactgctgcccggcccgccctccacctgaccaggcagctctgaccctccaattatccctgtcccgccatgtccttcaactctccctggctgctgtgggctctctttgcagcctccgttcccatcatcatccacctggtcaaccggtggcggcaccgttccgtcccctgggcggccatggaattccttctccgtgcggccagggaaacacgtggaacgaaaaaactgctgcactatctgattctggcactgcgtgtgatggccgtggcggcactggtaacggcctttgcgcggcccctgctcggaagctttttcggctgggggagctccggactgaatgaagtcctgctggttctggatcgttccgcctccatggatgcccgtccggacaaaaccagctccctccgggatgccatccccccgctggtggaatccacgttcgcgcagctcggccactgccgcctgtccctgcttgattccgccaccggaaccgtgacccagattcccgctccggaagccctggcggatctgactgtaagcaagacaacggatggaggcgcggatattccggcacttctgcaaaaagccatcccgtacctggaagaatccggcgcaggaaagacggaaatctggattgcctcggacatgcaggcctcttcctggaagccagactcccctctctggcccggtgtgcgccagaggctggccgcccttcccctgcccccttccatccgcatcatggccctccgcgacaggccggaaagcaaccgcggcatcagagtccggcaggctcaggtaaataacgggaaactggtgctggacctggaagtgctgcggcagggtttcaaccccaaccagccggaggacgtgccgatgcagctttccgtggataacgcctcctcctccgccacgctgcaactggcaggggaaaacacctccatccggaaagaaatacccctgccgcagggcaaggaatccggcttcggcttcgttgcgctgcctcatgacgacttcatcagggatgacatttccttcttcaccttcgcccccaagcctctcgccaacatcctgattttcggtccttcgggagaagtggggaaaaccctttccctgatgtccgcccctcccggcctgcccggcaggaaagccacgatgcccggcaatacgcgggaagctcaggctaatctggcctcccagtccatggtcgtctggtacgggccgccgccgcgcgcggaaatggaaaaaaaactccagacattcattgaagaaggaggaatagcccttttcctgcctgacgacacggaacacggaacacggcattcattcctgggcgtttcctggggcgcgacggagacggctccgtccgaacaatactaccgtctggaaacgtgggaccggcaaaggggattcctccgcgacggttccgatcagacacccatccccgccaaccgtctccgcgccgtgcgtagaaaacccctgctgggcaaataccgcactctggcctcctgggatgacggttcctgcgctctggcccaggtcagggccggaacagggtccgctctgttcctgggaacgctgcccagatattcctggtccaacctggcggacggccacctgctgctccccctgctccagcgcatggcggaccggggggcggaacgcttttccacctccatttccctacgggtgaatgacgcctccctgccgcaatccgccacggacacccccgtgcgcctggataatgcccagggaagccacccctccggttctccggccgatacggcaggcgtgtaccgactgggagcacagacctacgccgtgaaccgcccctggccggaagacatgcctgaccagattacggatgaaaaactccacctccttctgccggaagcttccatcagttccatgcagagtgcagaggaagccccctccctggtgcaggaagcatggaagctcttcctgttcttcgccctcgccagcctgctgatggaagccctcctgtgcctgcccggccagacggccaaacgcccctcccccaccacccgtccatgaacctgagccttcaacctactgcgtcaagcgtcatcctgaccgccctggttatggcggccagcatctggatgagctatatcgcctgcaagcgcaacctgctgccgctgacattcaaactggaaattcttcgcctggcaatccttggcttcatttgcttcctgctcttccagccggaatggatcatcacctccgccccgcaggaaaaacccaaggtttccattctggaggaccgctccggctccatggaaacgcaggatgttgaaatctccccccggcatgtcgtcacacgcacggcctacgtgcaggaactgctcaagggcaacagtacggaatccctcaaagacacgcatgtagtggaatacgcctccttcggcgcgccacctgcgccggactctccggattatgccatggcaagcacagacctggccaagccgctggaggacgccatgcaatcctccgacaacctccgggcggtcatcatgttcacggacggcagccacaacgcctcatcctccgtgctgacacaggcccagcgcatgcgcaccaggggcatccccctgttcatcatttccgcaggcagcccgtatcccctcccggacctggcccttcaggacgtgaaagcccccacttacggcatcatcggggaaacggtgcaaataccctttaccattaaaagcacgctgggcaaagaaacgcgcaccacgctcatcatgacttccagggatacaggaaaaaccgtcacccgcacggtcaccattccggcccagggggaggtatccgacgcggttctgtggaaaatagaaaaagaaggagcggaaacgctggaactcaaactcccggtccagccccaggaacggatgcacaataataacgcctcttccttcagcatctccggcaggagggaatccatcaaagcactggtcatcgataccctgccgcgctgggaataccgcttcatccggaacgccctgtaccgggatcccggcgtggacgtgcataccctgctctttcatccgggactggaagaaatgggggaaggccccgggtacctggtcaaattcccggacaggatggaagacctggcccggtatgacgtcatcttcatcggcgacgtggggctgggctccaaagggctaacggaagaacaggcctccctgctcaaaggcatggtaaaaaaccaggccagcggcatcgtcttcctccccggctaccagggcaggcaaatggaactcctgaaatcggaactgggggacctgatgcccgttacattcctcaacaccaagccggaggggacaacccagccttccccatccccccttatcctgacgccggaaggccgcggctccctgcttaccatgctggcggatacggagggtgaaaacgaagaagtatggcgcaatctgccgggcttcaactggtacgcccccgtggaacggcccaaagcgggaagcactgtcctggctgtgcatgcggcggataagaatgcctatggccgcattcctcttattgtcacccagtcctgcggcaacggaaaagtcctcttcatgggaacggattccgcctggcgatggaggcgaggagtagaagacaaataccattaccgtttctggagccaggtggcccgctggatgagttaccagcgcaacatggccgcaggggaaagaatccgtctgattcccaccccggaacggccccggccgggagacacgctgaccgtcaccgccatggtctccgacaaactgggggcccctctccagaatggagaggtttttctggacattacgactccggaaggaagctccagccgcgttcaaatggacactatggaccatacatggggctcctttaccgcctccgtcaaaatcaaccgtcccggcacctggaagctcactgcttcatcctctgcggaaccggataaatccgttacgcttcccgtcatcaccatgagtgaaacgctggaaaaaatcggcagccccgtcaataccgcgctaatggaggaaatggcctccatcacacgcgggcgcatggtaaaagctgaggaaatacagcggctcattaaggaaatcagggatctcccggtgccgccgcccatggaaacgcgcatcctgctctggtgcaacccgtatacgctctccatcctcatccttctgcttaccctgttctggataggaagaaaactcaacggcaccatttgagacgcaggtttcccacactttcccggcaggagtttttcttccctcccttcccgttattttcccgcagactccctgtccgcggcagcagaagccgactgagaaaatctcagcctcaatcccatttttttccaggccgcggccatttccccctgtacatcctccggagtcttcccattcagcaaaacagcacgcgccttcccgccgccctccgcatcacgaaccctcaaatagcttctgaggcgctccgcctttccgctcccctccaggtggctccagtaaaccatccacaacaaatcggcccaatactgaagcgttcctcccctggaggaaacgccatgctccgcggcggaatgtgctgaatccctggacagcatgtccgccagggtaagcagagtttctctgcccgtgcggacggcgcgcggaaccatcgcggccagcctttccggaatcttccggaataccggcgcttccctctccatgggaagaaaagccatgtacgcggaaaagccgtccaccagccagtgatcccaatccatggactgcgccgcccagtgcgtgacggcaaagcgcggatccagtcccggcttcagcagctttcccttcttatcccgcaacagcagagccgtgaaactggtaggggaaaacttgagatgcccgttccgcaggcccggagccctgttgaaatcctcttcctggaaacataccctcaccagatacttgcgggagggtaggcgggccaccgccagattcaacggaacagctgccagggcggacagaatggtttcaaaacgccgggcaaggatcatacgctccgcttccggcagctttccgggagactccatgatgaaatgatccgtttcatacacactcagctcctccgtctcctgcacggttttcaccagcaggaaaccgggaacaaccaccctctccggccagggagcatcccaattcggctccaggggaacgtaccgtctgccgaaatccccctgcacaggaggattctcagcccccacatccgtatcagggagcgtcccgccagactttacccattccagaatatattcctggtcggctccggaaaaaatattcttgggaacagccaccacgcgaccatcctgaagcttcaaatccacctccgcatcacggacggccaccagcacggctacgacggtagcgccccggtcattcgtccaaatgcgcgcccgggcgcttcccgccaggctcagccctgccaatacggacagaatctttacaggtaaggtcatagggttccctttgcccgcacaagctaccacattgtcccgcggacgcaaccctttttccgtctcccgttcttccggaacaggttccttgaaaagaatatggggaaggaatgcatcatcgcctgtcccccggaggggttgacacgctccggcaaaacccataatcttatggaagaaaggaaaagaaggcatgcatatcagtcccctcagaaaaaatattccgctgactgtcgtcaccctggcggccttgggcatcatgttcttcctgtttttcatgcatcccgcccctccggaagaatcattggaattctatgctccggacggcaatatcgcgggttccttccgggtggaaatcacgaatgcgccttccaaccccgcctacacggaagtaaaaatcattccggaagacatggaatccttccagcggtttttggcccagttccgcaacaaacccgttactgcaaaaaatccctcccacggcagccacatcattgttccgggccgggacatgcaatacgacggagtcctgcgcctgaccggacattgagaggtcaggcaaacagaagccatcttaaagttgttctccctttcccacgtccttcgcccacttccgggccaggaaggaacaaaccatcaactggagctggtggaacaccatgatgggaatcaccagcagcccgatgggggctccggcaaaaatcacgttcatcatcggaatgccggtagccaggctctttttggagccgcagaaaataatcgcaatgcggtcctcgcgggaaaaacggagcctgcgtgaaaggaaagccgtcagccacagggccgcggccagcagaaggccgcaaaaagccagcacctccaccagggaaagccagggcagatttttccatacgccgttaatcatcgcatggctgaatgccgtgtaaataaccagccagatggtgctgtggtctgtccaggaagtgaggttccggtgcgtgactacccatttgccaatccagcgctgggcgaactggccggccacaaaaggcaccagaataatatagcagatgttcaggaaagtggaaaaatccacgcccccttcccctccgcgggaccacaccagccccaccagcaagggggtgaggaacacccccagcaggctggaaacggaagcggagcaaatggccgcggccacattgccgcccgccatggaagtgaacgctatgctggactgcacggtggaaggcagcatgcacacatacagcattcccatgcacaaatccggccccagcacactattccacaagggcatgctgaatatacccagcagggggaaaataacaaaggtgctcgcagccaccagcccctgaaggcgccagtgcatcaacccttcccatacggaacggcgggaaagcttggccccgtacaggaaaaaaagcagaacgatggctgcatcgctcaggcggctgaacaccgtatcccatactccggaacagggaaccagaattcccgcgcccacactgacgatgaggccgatggtgaagcgatccaatttggcaaggaatcccggcatggagaaggaaaaaaggtaaatgccgcctccggcgttctatttgaaacgcacagcatgcttcttgctcaggcgcaggacgctgcccggagccagttccaaaacggcggaggggtctgtcattttcacatcattcaactggatggcgccgggcgtgaaatgctccttgcggagaacgccattggattttttcacctggaaaacattctcaaacaggaaggaaaccagggccagggcattcatgtcggcaggcagggaggcaatctccacttccggcaaatccgcggcagccaaatccctcttggaaaaacgggtttcccagtcagaacgcgcggcatccgcagcggcggaatcatgatagcgtgccgtgattttccaggccaggagctttttggcttccatcggatgcaatcccatgtcccgcttctcacccagcagcaccaggtaatagcggtccatcagttcgtcgctggcgctcatcatcttgccgaacatcatctccggagcctcatccacgcccacgtaattcccgtaggacttggacatcttccgcacgccgtccagaccttccagaagaggcatcgtcatggcgatctgcggcagcatgccttcctccttctgaaggtcgcggcccaccaggatgttgaaaagctggtccgtcccgcccagttccacgtccgcacggatttccacggaatcccagccctgcataatcggatactgcatctcatgcaggcgcacctccttacctccctccacacgggccttgaaatcctcccgggccagcatctgctgcatggtcacgcgggaattaagcttcagcacctcctcatacgtcatcttgcggaaccagtccccattatacacgatctccgtcttgtcacggtccagaatcttgaacgcctgcttggtatatgtctccgcattctccagcacctgttcacgggaaaggggggggcgggtcacggaacggccggaagggtcgccgatcgtggcggtgaaatccccgatgagcaaaacagcctggtggccaagttcctggaactggcgcaatttctcaatagccacggtatggcccaggtggatgtccggcgcagtagggtccacgcccagcttcacgcgcagggggcggcccagcttgagacgctccttcagctcttcgcggctgatcacgacggcggtaccgcccatcaatatgtctaattgctcatctatagtcattgatctggcgcatagagtgccgggggcaccgcgccttttcaagcctatatcctgtgcgcggctcatcgaacgcggccaagagtcccccgccaccggtcccgacgtgagggaacaggcacggaatccgtcccgaaaggcggaataaacggcacgccggtgctggcattttccccgcatggcccttcctcccgttccatgtcacggaccagccctgctcccttccggatgcagagaaacgtccccgcaaatctacagaagctggtacaggcggggataggaagcatgattggcggttatgtaatgcgggcgcggcttggggaccggctttgtccgcctttgatcccagccgtcacggtcatgatgatcattatcatggcgcggcggcccggaacggtaatcatcacgatcgtggtggcgatgatggcagcctgcggccaaaacgattgaggctgctgcggcaaaaacaggaatgatgttcatcttcatctttcttcagggtaagacagtccggcgggaggaatgcgaacggaaaaagtctgtcacccgaacaaacgctccctgttgacgaagaaaacggctcccaatacacataaaaacgcccacaggtaatcccacttccatttttctccgatgtagaacagggcgaaaggaataaacacgcacagggtaatcacctcctgaataatcttgagctgggccacgttaagcccgcctgcactgcccaggcggttggcgggaatcatgaagcaatattcaaaaaacgccaatccccagctcatcaggataattaccagcaggggcttgccatccgccccggaccccttcttcagatggccgtaccacgcccacgtcataaaaacgttggagaccaccagcatggaaatcgttaacgcaatcttcatgatttttatttaaaaacatcagtccttggaggacttgggatccagggcgtcccgcaggccgtcccccaggaaattcagcgccagaagggtagccgaaaacaggagcgccgggaacaaaagcaattccggacttacctccatgcggtccgccccttccttgatcagcgttccccatgaggaattgggagccttcacgcccagccccagaaaggacaggacggcttccagcagcatgatgccgggaacggccagcgtcgtgtacacgatgacggccccgaacaaattcggagcaatatggcggaacagaatcttcatgtggccgatacccagggaacgggcagcttccacaaactcctgccctttcagctccatcgtctgcgtccggacaatacgcgccagcgtcagccagcccaaagcgccgatggcgatgaacaggggaatcagcccggtcatggggctcaccatttccacagaccagcccgtcatgccggaaacccactgcgtcagcctccgggcttgctcctccacggacaaggaaaaaataatcaccagcacaatgaacggcagggcaaaaagcacatccaccaggcgcatcatcagggcatccagcctgcctccggcataaccggaaaccagtccgtacgccacgccaatcaccagggaaacgcccgtagcgaccactcccaccagcagggaaatgcggccgccgtacaggacacgcgccagcaggtccctcccaagctggtccgtgccgaaccaatggtcccaggaagggctttccgcaatccgggacaaatcctgcacattaggatgaggcagccacggcagcagggggcccagaaaacaggccgccgcaatcagcgccagcgccagcagggaaaacatggccgcccggttgcgggaaagacgcagaaaagcgtccttccacagggaggaaccctgttcctccgtcctgttccatcctctttttctcatgattcctttctcaatctcgggttgacggccatttgcaccagatccacacccaggttggccgcgacgatcagaatgccgtaaaacaggacaagcccctggatgaggaaataatcccggtccgtggttgcgttcacgaaatgctgccccatgccgggaacctggaaacaggtctccaccacaaaagaaccggtaatcatggcggcaaaagcaggccccagataggaaagggccggaatcaggccgcctcgcaaagcgtgcttccaaaccgtacggaaaggccccgcccccttggctcgagccgtccggatgaaatcctgccccagcacttcaagcatgccgccgcgcgtcaggcgcgccagatatgcggcattcaccagccccagcgtcagcgccggaagcaccacacaaccgggagaatcccatccggccacgctcaagccgggcacatgcatgcccagcgccacgccaagcagcggagccacgacgaaagcgggaatgcaaatgccggccatggaaacgagcatcacccaccagtccatccaccggttcttgtatagtgccgccacaattccggcgggaatccccgccagaatggaaatagccatgcctatgactccaagctggagagaaacagggaatgactggccgatcatatccgccacgctgacgccttccttcaccaaagacggccccaggtcgccatgaaccagcatgttccaccaataacgcccgtactggaccaggggagcctgatccagcccgtaactggcctggagctgctggaggacatgctccggaagtttcttttcccccatgaaggggtgccccggcaacaggcgtatcaggaaaaacgtcacagtttccagcaccagcaggaccagaagcccctgccccaggcgtttcagaatcatcctgctcaaggcgcggcctccttcccatgttcccgggcgtcgtccaggctgatatcctcaaacaaatgattgtccagcagcagggggtgccatccccgcacttccggcctcttcaaataggaccgtttggcccaatacaggggaattaccggggattcggaaagcatcagcgcttccgcacgggccagcagggccatgcgcttctcctggtttcccgtggcgcggctctccgccagcaggcgttcatactccggatgaaaccagcccgtattattgttcccggaggcggaaccccacaaatccagaaaactggaagggtccagataatccccggaccatgaggaggagctaaaatcatactgcatggaattctgcgcgaacttgtaggccgtccactcacaggaacggatatccacatgaatccccagatgctttttccacatgccctggattgcttccgccatcgtcttctgaacttcgcgggatgtagtcatcagttccagccggggaaaacccttcccgccgggaaaaccggcctgggccaacagggaacgagctttctccggattgaactccaccccatgcggcgtcttgtatccggcgccgtccggcgtaaagccgaagcacggctgaccgccgccgcacaccacgtcccgcaccagggcctcccggtctaccgccagggaaagggcccgcctgacccgggcgtcattcagcggcgcacgcgacgtattcagacggtaaaaaatagtcacgtaataatcatcctggcaaaaatcatcgccgccgcgctcccgggcgtaagccgtcatctcgggaggcacgttgttggtgacatgaagcttgccgttgaaaaacatgcgggtttccgtaaagccgttcacggtgggaagaaaacggactccattcagccggacggcggaagcgttccggtaccggggattgcggcgcacctccacataatcattgaaacggtgctccgccataagaaaaggtccgttccctacggccgctccgggccgcgtccatttccccgtcctgtccagcatgccgccgtgggcttccacggcatggcggggaaccggaaaccaggtgcagtgaagcaacagcaggggaagctggggcatcggagaacgcagctccatctccagggtataatcatctgcggcgcgcacgcccacgcgggcttcctcccataaatccggctttccggcccggacatcctccaacatccgggccgcaatcttccgcgctccttcctccggcatcccgtccggccactccatcagggaaggatcatcccgcagagcctccagctcaccggttcccataccatccagcctctcccaatccacccgggccaaaaccctctcttccagcctctcttccccagccagccgggaaccgggaccgcacagcagcaagctgcgcctgttccggttataggcttccgcattcttcagcggataaagcatgtccgcgtacctccctccaaaccccggatgaagcaggcggtgataggcatacacgaaatcatgggccgtcacaggaacgccgtcgctccacacggcgtccttccgcagggaaaaacgccacttgtccgcctccggactgtgcgtccacgactccgccacagcgggatgaaaaacggcatcatccctggaatccccgcgcagcagaccctccatgacggcattgatcatcttgaaatcggaaacggaagtggcgatgtgggggtcaaaactctggggctccgcattattgcccacgatgagcacccctgcctcctgagcccgttccacgctcgtacgcgtatcgcatccggcgagcaaaagcatcacacagaacatcatgaacaggcgcatggcgggattctgtcaggtttccttcccgtgcgcaaggcttcacgtcaagaaatacggcggcagagccacaacagacggagtgcccgcccaagagaggtaagcgcctctctggaatcttcatcccgcccggcttccctgatctacagcttaacaatatattttcttttgtatggtcatcatacgcataaaaattcacaaaaaaaacgatccttttctttgaagatttaccgcaacaccaaatttttctcaatatagattgatgttcagcatcgtatgatgtccgacatacgggcagaaaaaacaacacaaagaagtttcttatgggatatgacagaaatcatatctacagcgtatgaaattgttttgccaattgcataaatgaagagttcggcatgattttttgtgaaggaatgaacagatactgccattccttatagccgtttgccttgccccatcgagaagcaacttcgcaatactgaacaccacgcttttttcttggcaatcacatccgggtcattcagcttgtcctcccccttgacctccacgaggtaaataacatcatcggtctccacaacaaagtctggctcgtagtgccgcccgcgattataggtgatgttaaactccctcggcgccgggcgcagccagttctgcacatcggtatcgttgtccaatactctggcaagtaccagttccggcaagctgtcaaattttgcggtgttgaacacgccacgcttaatgccatcaaacagtacggattggattttctctgtacaggcatcatacagacccacacgctccacgaaagtataggactgctccaggttataatttcgtgtgccgattacctcctcctgcaaaaatccgttctcgcagtagaaatgctgcaacatttgtgcgtatatcatatttccgatggttttcttgtacatcatcacgatatttcgcataccattgatgccgtactgcccctcgtagtggccgcacacctgggtaataagcttgaacagcaaaaccgagcatttttcatagtcaatttcagcctttgtccgtaactgctccaaaacgaccttcttaggattgaagccttcaaaatcaatggctccacccttgattcgctgcctgtcatacatatcttccaaattctgcacaagcagttcattttgaatcggcgcatgagtaaatccggacaggtctaaatcgaaatcgacaaatacatactcctcaacaccattgtcggttaccttgatgcggggaatagggatgaatttgctttctgcgacacgatgtacttccttggttttgtgcttcatccaagccagaaggggattttcgttgtcacggaacacctcacccaaatccctgtctttggacaccttcttcttgactgtctccacaatctgttctgcctacgctggggtaacagtatgaccgggcgtatgctgaatgtgctttgatacctctgcggtgatgatttccgttgcagtgcgtatcaaagtgtctgtagtttcagtacgggtaatatcagtgcgggcataggcatcttccaaagtcttatccggctccagctcaatgctcatctgtgtataaaccacctgttccgggacaatatcttcaacctggatgacatttccggctttgaagatagaatcgcccttttgagcctctgccagaatatcggagaatttatcgtgggcggtgagcatcaccgcatccacatctctatccccgacgcgttctccgtaaggtaaacgcagaccacggcctaccatctgttcacggagaattttggaggcagcagtacgcaggggaacgatggtatagaggttattgacatcccatccctctttcagcatattgacatggataacgatttctacggggttttccgggttttcgacattcaggagcagacgggtgttggcttcggtttccgaacctttttgcttggagtggacgatgatggtcttattgcgataggccccgtcacagaattcatccgatttcacgaatgcctccacccatgccgcgtggtcagtgtccttgcagacaatcagcataaatggcttcaccacaggcttgccgtggttggcggcatagaccttcagtttccgcctagtgctttcgtgacaggtgataccatccaggagcatcattttatcaagctgttcatcaccgaaattgtaaaaatcgatatcggaacgggtcaccgcatacggagtacgggtgtagccatcctcaatagccctggacagcggatattcgtacaccacatttttgaacggcacctgctttgtaccctttaccacaagaggggtggctgtcagctccaatccgagcagaggattaagttcgttcagcgcctgcgcgcccttttctgcacgatagtggtgagactcgtccataatcagcaccagatccgacagattggagaggaaatgatagaaggagtcaccgatgacctcgttgaccttcttcatgttggcgccttccttattaaacttgtcgatgttatacacaaaaatatggatgtccgattcaaagagggacagtgttttttcacgataatcatcgtctgtgattatctgcggcggggtgctgaaacagccaagaccacggaacacatactttgcactgttgttatcactgaggtcttttttcagcttatcgtaaattgtggtgttcggagcaacgacaaaaaagttccgaatattgtgttgggtatagaggtaggcgataaaggcacccatcaagcgcgttttaccgacacctgttgccagtgcgaaggagagggacatgaagtcacgttcaaaatccgagcaaatcggatacatggcgtgaacactgcccaaggcggccttcaagttcatacccttgcggagattgaccgccgatacgatttcttcaaggattttcagcgatgctgtctgcggtttacgcagggacatgactccgctaatgtaattggtagtgtattgagggaaataattattcatcacattcctccgcatcttcgtatactggtggatgcacgatattcaaattgtagtcagccttgccgaattcacaacggctgagaagcatctgcggaattttcttgatggtgatgttcggatacgccttgtccagaccgctttcaaaggaacggcaggcaatcaccaaatattcgccatcttccatggtatcctggatggagtccaggtaggcactgttcaaatgccgtgtggtgacgaacagataactgttttcgttgcccacggactgtttccagaacagaccttcgctcggctgataggtaaagccttcgtggagggccacagcggatgcaagcatacccgcatcgtaatccgggttaatgacagcttcaccaaacgggtcttcattgataagagtaggtgcaagttcatagaaacgataaccaccgccaccttgccaatctacggattttgtgataccgccagtatcttctccagataccacttggtcgagacgaactttacagtgtgtatatgcgtggtcacccatttcaacaccaatatagcgtcttcccattttgtgagccaccgcagcagtggtgccagagccaagaaaactatcgagtacaaggtctccgggatttgtagcgatagtcaggactcgttctatcaatctttcgggcttgggagtatcgaatattgcttcgaattgaagtgccttgatttctttttttgcctcctgtgtatgccccacttcttgataaggccatattgtttgaggaacgattccgtctctaacttcggtcaaaaacctcttcaaagcggggacattatttccatctggaccaaaccacacacgattatcagcaatcatctgcttcataacttcttcggtatagacccagcaccgacccgctgtgagcgtatgctctttcccgttgggagcctttaatacataaaattggcttgtagttccatgcccagcttgggctgttgaatcagtagacttccataccccacgggggtcattgtcaagattcttgtatctatcattggcttctgccgttctcggcagtttattgagagaataatccttggtcaaattttttggcatacaccaaaatgtaatcgtgagagcgtgaaatagtttttttgaggttaaccggcgaatatgctcgttgccatacgattgtctcaatatagttgcttctaccaaagacctcatcacacagcaccttcaaatacgcctgctcatcatcatcgatactaatccaaattgttccatcttcggagagaagagtccttaaaatttgcaggcgtggtagcatgagactaagccactgactatgctccagattatcatcataatgctcgaaagcggagcctgtgttatatggagggtctatgtagatacacttgacctgtccggcatatttgctttccaatgctttcaatgccaacagattatcgccatgaataagcatattgcctgtgttggcgtccatagccacattggacaacgccgggttttcaatcagcagacgaggctccacacgaacaggctcgtccttcccgtaccaggtcaattccagtttatttgccattgcgtgttacctcctccgtcgccaatttcatgatttcatccatcttgcattccaggccacggcatatcttttcctcggactcaagggaaatgtagatgccattccgcagccgagtggatctatttgcgctgtagcctgcctgccgttgcaggtcggttatggtcctattttcatcaatcagcatatgcaacaacttcttataacgaacagccccctttatattccaattctttcccatcatcaagaacatcgggaaaaattcacgcgtccgccccctcattgcgaatggcatcagaagcggaaaaactccattctcgcctagtctgggcttttattgctgaagaacagcgcccctcataagccacagagcctcctttccatcatcccttttgagtaaccggagaaacagggggaaagcaaaaccccgcaacggctgaaaaccgttgcggggctgttttcccaaatcaagggaaaagaaaagcggctttaattatttgccctgcgcctttttggcagcgtcaatctgggccttgatcttatccttgttggcaagaatgccggccttgatgcggggggcctgcattccggcttccgttcccggcttcaactcggccaccttatccagaatcagaacggcgccgtccacgtcaccggtggaattcaggtaggtcccgaactccatcatcagcaactcctgctgtgtttccggcagaagcttgtcgcggtcgggatatgccttaaccacctgaagggcttccgcaggcgtagtcttgtccgtcagcttgcaagcaagataattttgaacatccttacgttcctttttaagctggtcggagagggcgtccgcagctttcaggccggacttgtcatccttgtccagcttcttgatttccgctttcacgtcaccatagaaattgtccacatattcctgaggagccagtttgagcacttccatcagagcggcaactttcgcttcatccgtagcggccttggcgacattcgcttccgcagcattaagagcttccttgttcttcagggcatcctgcatggctttcatgacatcatccccggagcgccctccaacaaatcccccaaaaggcttgccggaagcgtccgcaaacacaacggtcgggaatccccgcacgccgtattgctgggcaagcttttcattggcggctttcatttccttggactgttccttgccgcgcggataatccagctccaccagcacgaaatttttctgcgcttccttctggaagtcaggcttgctgaatacgttggcgcggagctgcatgcaaggagggcaccagtcggaaccggtgaactcaatcattaaatcctttttctgttcggcggcctgttttttggcggcatccatatcggtaatccacccttccgcggcaaagcagggagcgacgcaggcggcaacaacaattggcagaatttgtttaatcatatctataattcaatattgtaaaatcggacagcccgcgtcaatcccctgttcaatcatttttagaaaatctccaaaagggtgcgtcttccgcagggaagtccgcatacggctgatgccggaaaaactgatgccccataggaagacggtgtcattattgaagcaaatcgggagttgcctttcagcctgttttcacttatgtactgaacctatcatgaacacggttttaatcattggagcaggcggcgttgggcatgtggtagccaacaaatgcgcccagctgccggatatttttcaaaacattcatctggcctcccgcacgaagagcaaatgcgatgccgttgcggaggacgtacgctccagaacgggcgtcagcatcactacccattccgtagatgcggacgacgtgcccgccaccgtagccctcatccgggaaatcaagccgcagctgctgatcaacgtagccctgccctaccaggatctcaccctgatggaagcctgcctggaaaccggagtcaactacctggataccgccaactatgaaccccgtgacgtagccaaattcgaatactcctggcaatgggcgtatcaggagcaattccgcaaagccgggctttttgccctgctgggttccggctttgacccaggcgtcaccaatgtattcacggcatgggctctcaagcatcactttgacgaaatccatacgctggacatcattgacgtcaatggcggcaatcatggcaaggccttcgccaccaacttcaacccggaaatcaacatccgggaagtaacggcgccctgccgccactgggaagacggagccttccgggaaaccgctcccatgagcatgcaccaaagtttcacctgcccgcaggaagtgggcacctatgaaatctaccgcatgtaccatgaagaaatggaaagcctggtcaagcacatccccaccatccgccgggctcaattctggatgtccttctcaccgaactacctcaagcacctggaagtgcttcagaacgtgggtatgacccgcattgacccggtcatgtacaacggagttgaaatcatcccgctgcaattcctcaaggccgttctgccggaccccggggacctgggcaagacgaccaggggaaaaacctgcatcggcaacgtcatcaccggaatcaaggacggccaattcaaggctgtgtacatttacaacatttgcgaccatgaacaatgctttaaagaagtaggttcccaggccatttcctataccacaggggttccggccatgatcggcgcggaaatgatccttacgggcaaatggactggcgcaggagtcttcaatatggaacaaaatgatccggatcccttcatggacgagctcaacaggcgcggcctaccctggcactgcgtggaactcacggaagaacaggccaaaaccctgaaggtcaaccagcaataaatttcagcaagcgctgtcggcatcatcaaagccggacattgaatttccaatgtccggcttttccgtttccagcggggaacagaattccccaggacagcacgtcaacgcctgcctccgggaaaaagaaaaagccccgggcggcgtctttccgcctcagtcataattttctggcgggaagagcagacaggttgtaaaaactcagtgccatgaaatatcttgcgttatttctcatgttcctgcttcagccggtactggcggaagatacagccccatggaaaatagcgatcatcggcgatacgcacgactcccccaagcgtatggaaggaagcgagggagtagcagtcaacttcatcaaaaccctctatggggaaatcctgaaacacaacgtggacatggtcgtccaggtaggggacatggcggatattgaaggaagcgcccccgtcaagggactcgccaaacgcaaggaactcaacaaaattctgagagaaaaaggcatccccttttatgccgtgcgcggcaatcatgaatcccttcctttccgggcggaacaattccgggaactcttcctgcctacgcggaagcagggcgccaaagggctggctaccagaaagttgaactacggcatccgccataaaaacgcttccctgtatttcatggatattgacctcacccctgaccagctcgtggacttcagtgcgtgggtcaaacgcaacagaagcaaggccaacaccgttccgaggcactgcctggtcttcacccaccgcaccctgcagacgcccatgcaattccgggaatgcctgtggggccgttacaacgacagcgcggcggaacagcaaaacatcttttaccgcaacctccgggacgccggagtgcgcttcgtcgtcaccggacacctgcacgcccatgacctgtatatgattacctccccggacggacaaaacacccttacctccctgatctgcgcccctgcggggaacaaggttcttcccatcccttttctgctgcctgcaaaatcccgggtaaaaaccctgcaataccgctccggcattacggcctactatatcctgaccatttacccggattccatgaccctggatacctacgccgcccccaataacggcactactgacgaaggcccccaaagcggagagttcaacaaattgaactcctacgcaattccgatggattagaacatactgcggcccccgtttcttccataacgcagcatcccggaatctgcctgctcccgtccgctatacacccctggcgtccctggcggaacaatgggattttccgggaagttcccaatcctccatgttatttcatatgcccggagccacgggactttatctttctatcgtgctggcgcccccggtcgcccttatataaaaactccgttcttccatctcggcctacagtacggtcaatcaggtctccgatttcctggtcagcgtacccggccttcttaagatacttaaccacttcaccagcctgccccggataaaaacgggccagcatccccacaaacgcaggtcccaatctcttttccaaatgatacttacaattgttatttctgtcttcattagacagcagcttattgttgtaataaattgatcggggatcagccccgcgaaataaactcagttttcgttcctgaaccagtctcaaggttctttcggcactcattttatcgtattcctccttcatcctggcctgtttctgctttaattccggatcatactgagtcctgaatgttttcaatacggccgctccatattctgcccagattctgcacagctcctttctctttacgccgcatcgggaaacgattccggatatatcccaggataaaacgttcatccattccacaaccctagccttcagcttataatccatgttatcatataagccgtccttcggagtattctcatcataattcagaggaaatacgtccattgaagagacagcgtaaaaaatccaggacaacaccctgacgtcttctgcgttcacatctccagctcccttggaactaaaggcgccaagtttcttccgcgcctcccggtaacaatccggcagctctttttcatgcaacagggaaagaaactccttcttttcctgaggagacgttttgaatgcggagatgctgtcgggcaacggaagccggagctgggcaggctttccttcagcagtatttcccaaatatatatcagcggaatatgcctctgtttccgtttcaatcctcaacgcgccggaatcctcttcctccacgtccgcaaaggaaaaaccgcacagggaaaccgcgcaacctattaaaagaattcttatatttttaacaacaaccgccatcagacgcagatgataccttattgccatttcccattattccatagcaaaaaattctaacattccgcagctttttcctgctaaaagattctgatgctcttcacgccataatacatcgccgcgcctctgttgacgtagtcttccgggttttgcgacaggtctacccagaaaatgaaagaacaccagggggagggaggagagaggggaggaacaacgatttcctgaataccggcctttttctgctccagaaccaggcggacgcgcttttcatgctgccggaacagaagcagatgatcatgaagggttgaaaaaacgcatattccggacaacaccagaaaaacggccacagttatctgcggacggggcatggcactggggatgccgtaccacatacgaagaagaaccagcacgccgacgccgaacagcagggtggcggagaacatggcatggtccgccggaatgacggcggcggcgaaagaaagagccatggcataagacgccagaatatatgccgccgctattccaagggaaattttccatgcccggaaatagttccggtccttgcgaaaacttttccagagaacccaggcagccgccacgcccagcaacaccggaagagccaggtattcatgcatccggaacaggagcgaagggagagcttcccatctgctccaaaaaccggaaaggggttccgcgcagccgggagtggcggaatgcatccgcgcggaaatgccgggcgcaagcagcatgcacagggaacctgccacctggaacacaaggcccgcataaaaccacaggggaagtttttccttccgcaccaggcggacaaaaacaaacaaggctcccagcaaaagccaggttcccggaatattgttttcattggtcatgcctgccggaaatcccagaacagccgcagcggcaaactttccccagccattgtttattccggaatctccctttctcccggattccgcgtcgtccagcaaaccgcggtacagacacagaaagcccagccagacggcggcgccccaggaatagttggtggcgccggagagccagtaaatcgtgacgccgggccgggccgtgcacgtgaacagcaggagaagccccaatccgaacagacgcacgtccggccaggaacggggatccaccctgcgcccggaagccagataaaacatcatcagcgcaagaccgacctgtacaaaggggttgagcagcatgaagagccattttcccgccgtcgctacggcaaaggccaggtattccccgattctgggattccaggtcatgtaggaggctacgcaacgctcccagaccaggctgaaagagaagcagtgctccatgcccgtcagggcatgatggtacgcatcggaagtgagaggactccaccagctgagcagcgccgtatacaataaggcggctgcggtcagcgcccaaaaccacaccctggacgtgcggggggatatcatcagctcggatccggtttccttttccgcagtgcgggaggcagatccaggtcttccccatccagaatgagggggcgcacacgggcaaaaaggccgtggcccgcacgctcttcctctccttcctccggaggcaagccttcctccagctccttgatgtcaggcatcgggactgactccaattccggctccgcctccgtttcggaaatttgcgcaacagacgcggactcccggagcgtctcctcttcatccggaatcccgggaacaggccttacgggcaccagttcctcttccaattcacgttcatccctcctggggacgggaacaggggaggaaggatccggctccggatgccgttccggttcgtcaaccggggcaggaggtgcaggctgaataatggttttcccctctccgaggaaagatttttcctccggtacaagcactgtctgcgacgccacttcccgctgaagcacaacagacggggaaacagatgtctctaccacaggcacggcgcccagcacggtcagggacaggcggtcttccgtctgctgctccacggaagcgccgatgtgaaggcgcacccccttccccaggatttccgccaccccgtccaccagggcttccaggcgctgcagtgtcagggaagctccgccgcgcaccagaaccaggacatcatccacttcccccaaacgtttttccagaaagagaggggaatgccggacctgatccaatatgtccgccacggaagcatccgcagacgcttcacccacgccaaaggagcaaattccttttcccgttccggctacgctgagcaggtcgtccaatcccacccggagcaggtttccggaagaattcaacagagacggcacaataagcacggcgcgggctataagggcgttaactacggaaaaggcttccagcactcccctgtcggggtctatgagactttccatggcgtcattgtcaaaccgcagcaccatgtcggaatacagggcaaggcgggacagcgcttcatccgcctggacagcgcgccgttccccttcaaacctgaagggacggatgacaacgctgacgacataagccccctgttccttggccagacgggccgcttccggagccacgccggaccctgttcccccgcccagcccggcgacaagaacagccagggcgctgccttccagagcacggagaatggaagactcgctttcacaggccgcctgggctcctacggaggcgtctccgccggagccgagccctctggtaagcctggcgcccagatggaccttgcacggaacggctgaagcgttcaaaagccgggcatcaagattcatggcacaaacggaagctggctgaggggacagcaacaacacttcttccattaccttggtgcctgcggcccctatgccgcacaggcagatttttccgggcaggccggacggcccctggggagaaatttccagcatggttgttaatttggataaaggttgatcaggagttcttctttccgaagaaacccagcatccggcccagccagctgcgctgttgcggcagctcggcatccagaatctgggcataccgtatcaggcctatggccgtgcagtagcgcggatcgtccaggtaggaaggcgctccgtttttgaccagcgtaggtcggctgatggccacgccgaacacgtgggaggccagttcccccacaccgcgcatcaggctggcgcccccgcacaggtacacgccgtggcagcggttgcccttgaaagtatccttgggcagggaggatttgaccagattgaagatttccaacagacgggaacggatgatttcattcagcacgttgcgttcgatggcggcatccttcatatgcccctctccacgcacgcgcaccatctcgttggttttcccggagaagctgttggcgtccccttccgttttcttgagcaactccgcctgggccagcggaatgccggtcatcagcgtgatgtcattggaaatgtggtcgccgcccagcggcacgcatccggaggccacaagctggccgtccaggtaaagcacatagtctgtcgtgcccgctcccatgtcaataagcagagcgcccgcctgcttgacctgcctgttgagcacaaactgggccgtggcaatgggggcaaaaaccacatccgcaatatccagagggacttcccgcacgcaacggaaggagttggtgatgcgggatttgattccgtggatgatatggcagtcgatgtccagggttcttccggtcaatccggcgggattggtcaggttctcctgcccgtccacggaaaagaggccgggcacgcggtgcaggacgaattgttccggccccagggcaacgtcccgggcaatttccgtcacctcgtccatatgctcctgggaaataatgctttcgtccgggggaagacggaatgtcccccggttgttctgccccacaatatgggctcccgtcacggacagatagacggtcatgatatccacgtccgcatggtcctgggccatgttccacgcatcgtaaatgcactggatgaccttggaagtgtcttcaatctctcctcgaaccacgccctcgctaggaacctcacccacgccgatgattgtcacggtcgcatctggcttcacttcacctacgaccatgcaagtcttgcttgtccctatctcaagccctacgtgaatttttgtcttagccatgaaagtcaaggaactatcaacgtcctcgcacctgatagcacattactttccattattcaagaaagcctgcgcgaacatacgcagaaaacgcggttttcctccgcgcagctccggttcaaaggcctgtaggatggcgcaccaggaagtttctggtattgcggccgtccactctccagcggggaccttcgccgcggcgcccgcttcccgtggtgtcaaaccggaggccgcagatgaccatgaagacgtgtccgtttttggcataaatggaaatccagtccccggcgcctttctgcccgtaattcaggaaaagcctggaatggcgggtggacgtgagcaaaccggcttccttcagcacaaaggaagtgctgccggaacagtcataatgggtatcataatgcctcctgtgccccccgcccagccggtacggcttgttgaccagggaattggctgccgcaatggcgcgcttgacctgcgaaggggcatttctggggggaatggctttcccgttgtgcagcacggccgtcttgccgggcacaaagtggtaggcgggaagacgcgcaggagcttcaacttgttgctgggaggaacaggaagagagaaaaaggcttaccaaaagggcaccagccacggagagagttctgtgggccgcaaatgtcataaggattataaactgcggaattcccgcccccttggcaagaaaataaattttccccgtccacattacatggtagacgggggaaagaaaccagcaatatttagccctaggaacggctgtgggcatccttttccacagccgcccacagggagtccagggaggcctggacctccgtcaatgcttccttcacaggggcgcccggtttcccgtgcccgaagaggtagtatttaatcttgggttccgttccggaggggcgcaccgcaaaactgcggccgtccgccagatctacaaaaatcattttttccgccggaatgggatcgccttccgcgtccaccaggtcgcctctggaaaaatcccggatgccgctgatggctacgccgtccacttccgtgggaggattggaggaataggaggcggcaagggcggcgattctggccgcgccgtctgcgccttccatcaccagtgatttgcccatttccaaatacacaccgaactgctcaaagagttcatgcagcagttccagaaggctcttgccgatgctttccgcataagcggccaattccgcaaaaatgatggcggcggagttggcgtccttgtcccgcacaaagtcctgggccaggtagccgtagctttcctccccgccgaagacaaagtaacggctgtattccaggcgcagggcacgcgtttgttcctcgctcatcctgcggtagccttcccgtttttccgccggaatggcctgttcatatttaccgagtttctgggcaatatacttgaaccccgtgagcacgttgaccacttcataaccgaagtggtggccgatggcatcctgaagccccgtcgtcacaaaggttttcaccatcacggcacgggaacggttggagtcattgatgatgccaagatcggacatgctcatgcagcggtaccacgccagcagggagccgatctggttgccggtcagcaggtgcatcttgccgtcttccccgcgcacagccacccccatgcggtccgcatccgggtccgtggcgatgacgatgtccgccccagaagcatccgcctgttcaatggccagggccagagtaagcggattttccgggttgggggaagcaaccgtcgggaaacggccgtcctgcacatcctgcgccgccacggtctgcacgttgcagcccagttccttcaacaggggcacgatgatatggccgcccgtcccgtggaggttggaataaacgatcttagcccctcccctgttgaaaagctccggacggagcagcacggttttcaagcgatccatgtaaatacggtcaaaggaggaatccagcacatgaaggattccgcgccggttttccggcaacggttcatattcttcggaagtcagggaattgacctccttgatcacggccttgtcatgcggaggcacaagctgggccccatcattgaaataagccttgaaaccattgtcatgggagggattgtggctggcggtcagcaccacgccggaatcagcatggagttcccggatagcaaaggagatttcaggagtggcgcgaggactgtcgaacaagtaaatgtcacaacccaggtccgtgccgatttttgcgcagaattcggcaaagtcacgggaaaagtggcgcgtgtcgtgtccgatgaccaggcggggtttcctgcccgggtccgtagcctccacatgctttttcacataaataatcaggccccgcattgcccgcccaacattgaagtagttcatgcaggcagttcccacgcagggatattccgggcggccgttcacgccgccgttcccctgctcggcccgggttacgatgctgccgatggtgcgtccccgcagcccccctgttccgaaggccagcgttttgtaaaaacggtcgttcaactcctgccattccccggcggcaaccagttcctctacggcctcgcgtgctatgggggatttggttccatccagcagaaggcggatattggtccgggaagactccaaaagcttcccttctttaacggcattcatcagggattcgtccagtgtattcatgctggcggaatagtacatcatgccccttgtttgacaatagctctttccatcatggcctgagaaaaaaacgccatattcatcccggtgcgggcgcggggaacgctttccttcccgtcccctttttatttaaagggactggcggtcatacagctcccggtacaacgggcatgaggcataaagctctgcatgggaaccgtccccgacgatgcgcccgctctcaaacaccagaatgcgcgtcgccacgcggatggaactgaaacggtgggccacaataagcgccgtccttccctccaccagccggtccagttcctgctggatcagggcctcgctttccgcatcaagggaagcggtggcttcatccagaatcagaatgggagcatccttcaggaaagcgcgggcaatcgctatacgctgccgctggcctccggacagtccgcttcctccgtcgccaagcatggtctggtagccgcccggcatgcccatgataaagccgtccgcagctgcggcgcgcgccgcagccaccacctcatcatccgcagcgtcctgccgtcccagccggatgttttccataatggtgccgtggaacaggacggggtgctgggaaacgaaggcgatatttttgcgcacatcgtgcagggaagcgtccctcacatccacgccatccacgcgcagggttccggaactaacgtcataaaacctggggagaaggctggcaaatgttgtttttccggctccgctgggccctaccagccccactacttccccggggcggatatgcacgtttatgccgtccagcaccttgcgggcaccgtcataggagaaggaaacgccgtcatagtccagacggtaggcggcgcgtcccatagcaacggggtcagcggcctccggcatggtatccggttctttcaggaggtaattgatgcgttccagggaagcgtaagcgctcttcaaattggtgagcgtcacacccagccgtttgagagggtcgtaacacatgaacagggcggcggccaaagcagtaaaatcagccttggtgatgcccatttcatgcccccttaccagcaaaacgcccagccccagcgccgtcaccatttccagcacgggaaccaggaagtgcctgtacttcaccgttctgagattgattttgaaaaaacgctgaatcagccccaggaaaagatttacctgctgttcctgcattccgtaggaacggatttcacgctgggaggccaaattttcctgggctgcggccgtaatattgcccagttcgtcctgagcctgtttggacttcttcatcacgcggcggccgaaaaagcggatgggccatatggccagcgcaatcagccccagattcatcaggaccactgccgtattcggatcaacaaataccttgtacaccaggaaggcaagggcggtcagcagagtcaggggctgcttgatgatgtcattggccgctaccaccagccccccctgcacgttggcggcgtcattgatgaggcggctgatcaggtccccccgtttctggcggtcaatgaaggaaaggggcagcgtctgcaatttggaaaaggcgtccagcctgatcgcctccagcactttcatgctgacgatgctgatccagtacacgttgaagaacgtgcctatgccacggacggcgaagaccagaggcagcagggaacatacggccagcagcaccgccaggtgcatgtgttccggggccaccagccgggcgatcatgtcctgaagctccgggggaatctgtgtattgtcaaacaccaccggaaatactttggcaatcatcagcggaaagccgaaaccgctggcggcggcagccagagccccggcagccagagcggcgatgaacagcttcatcacgggcttcaaataccgcgcatattcaaaaaactggcttaacatggagcgcctccttcctcctccgcaaccatctgctgcttattgtaaagttcccggtacaggggagaagaagccatcagttcctcatgcgtgccgtccgcaaccacacggcctttctccagcaccaaaatgcggtccgccatccggatggtgctgaaacggtgggcaataatgaacgtcgtgcggccggaagccaatctctcaatctccttctgaatctgctcctcgctcttcatatccagggaagccgtggcctcatccagcaccagaatgggagcgtttttcaaaaaggccctcgccagggaaacgcgctgccgctggccgccggaaaggccctcccccatttccccgatcatgcgggaatacccttcccccgtctcattgataaaactgtccacggcggacatgcggcaagcttcctccacctccgcgtcggaagcgtccggacggccgatgcgtatattgtccgccacggagccgcggaacagaacgggatactgggaaaccagcgctatgtgggaaagaagttcctttttactcatctccctcacgtcgatgccgtccaccttcacgctgccggaaaggacatcataaaaacggcacagcaaattaatgaaagtcgtcttccccgctccgctgggaccgaccagggccaccacctgcccggacggaatgcggagatcaatgttcctcatgacaggagagtcctgctggtaaccgaagcaaacgttgcggaactccacttcccccttccatgccgccgggctccttgggttttccggttcgggaacgtcatcaggagcattcagcacgtggttgatgcgttccagaccggcattaagggtttccgccttgttatggacggcccccagcttcttgaccggctcatagcaaagatacatggccgtagccagcgcggcaaaatcccccatgttcatgccgttcatgttgccaaccagcagggtggcggccatggctatggcgctgacgaactcaatcaaaggggtcagcaggctctgccacctgaccgcgccgatggatgcctggatgtaacggcggatcctgtccctgaacagccttatctgctgctgttccagttcaaaggcccggatatcccgctgggaagaaaaattctcctggagcgtggaggaaaggtccccctggctggactgcactacccgggcgcgggcaagcattttcctgccgatgtaccggatgggaatcacgcaaacgcctaccaggagcatattcgccagcagaataagaaactgctcgctgacggaggccctgtaaatcagaaaccctaacgcggccaaaagagtcaggggctggataataaggtcattggcaatctgtaccaggccgccctggagaaactgggtatcctgcatcaggcggctcagcaggtcccccttctgctgccggtcatgaaaagccagggacaaatcctgatactttctgtacaccttgagccgcaatgtctccagcactcccagccctattttggaaagcaaatagacattgacaaaagaagacaggccgcgcaccaccaccaccagcgggagcatggccgccgtggcccacaccgtcaccaggggcaggttttccgggctcacataccacaagagcacccgttccgcccacggaggcagcggtttcccgtcaaaaatcacgggaaacatctcctgtaaaatcaccggaatgccaaaaccgctggaaacagcggccacaatgcctccgaccaccgcccacaccagcgtacccttataaggaagaagatactcgcgccacaatgccctggcgcgctggatggaggattcctgcccctctgttgactgtttcctcataagtattccggatggccgcgcccgggaacggacggcgcgcaatcggcagggatcataccatgaagaccgtgaatgacaagctccttgcgataaaaactgcatgggtaaatgcctggcgggcagacctccgggcatcccggcttgcccgccaccccgtaatggtctacctttccgtcgcatgctgaagacaggattaatccaaccggaaaccattcccggccactttccccgaaatctcagaaccatcgtggaactgtaccgttcctgcctggacgcaggcgcggagctcgtcctctgtccgccgctggccctcagcggcgtgcataccggggaactggctctgcgcagcggcttccggacccagcaccgggcggccctggcctatctggcacgggaaatagcggacgtccccctgctgctgggagcgacggacgcggaaggcataagattccacctgttgaggaacggcctttcctttccccggcaggccgttatccctccctcccctcatggaaaagaacgcgttcccgtctttggcatccggagaacggaggatgaggccgttttttccatcgccccgtggggagaaattcctccgccgcacgtttccgccacatgcctgctgctccgcacgcctgccaatgcatggcatgagggattgctggaacaggatgaggaagaagcccacctgacggcgcgggaaacaggcctgcccgtattcacggcccgcctggccgggggagaaggtccgtttctgctgcccggcgcatcttccgtatggtccggcaatgaaaatcttctcaaacggctgcgtctttttgaacgggattccgccgtcatttcaccggaaaaccccacaggaacggactcccccctgccctccccggaacaacagctccggcacgccctccgcaaaggaatgaaagacttcattctgaaaagcgggtacggggccgtctgcctgaatttgctggaaaattccgcatccctcctgttggcggaactattgaaggaaacgtgcccctctctggaagtgacggggttcctcccctccctgcccggcattccggaaaagacacgggaaagagttcaagccttcgcaagcacggctggcattggcgtacggacggtttctttccccgccaaagccggagggctggacgaaaaagctgcaatcgcgtggctcatgcgccaatgggcggaagaagaaggcgccctgctgatctcttctctgacggggacggatatcatgacggcgccccgcttccttccagccgctttagccgcggatttcatgccgctgggggatttatacgaaacggaactggcaaacgtgttccccggttttatttctcccgctccggaggccgccaggcgcgacgggtttctcatccgcctgcaccgggaacatgaatccgccacggagctggtgaatcggttcccggaatcggaaagggaaatccgccgtctgcagcggcaggcccgcgcatccgaatggacacgcctgaaactgccgccgcacctcatgctacgcaccatccccggaacgcaggaaacgccttatatccatcggctggcagactgacgcggaacctcccttttcctcccgtggcatacattgcgcttgctcttgaagtggaagaagtgattagtagaagccatgcaattccatgtagcaaccatgatcggccgcgccgctttaaggctggttgaccggttggggtcaatcggattgctgctttatcaagtggcttcatgcatgtggtctggccaattccggatgcgcgtgcttgtggagcaaattgcaaaaatcggggtgcaatcccagccggtggtcatcatcaccggcgcgttcaccggcgcggtgctggaagcccagacactattccagcttcaaacggtgagaatggaaaccatgggcggggccgtcgtcgccgtgggcatgttccgggagctgggtcccgtcatcaccgggctgatgcttgcggggcgcgtcggatccgccatggccgcggaaatcggcaccatgaaagtcacggaacaggtggatgcccttaaatccatgaatgtggatccggtagactacctggtgaagccgcggatacaggccatgcttatttccatgcccatcctgatgatggaagccgttctggtgggcatcgcctccgcgtacatcgtcagcgtcaccgcctttaacgtagaccaggcctactggatgcacttcatgagcaaattcgttactatgggggacatcatcgtagccctggtcaaggctcttgctttcggcctcatcatttccaccatctcctgccgggaggggctgaacaccacgaacggcgccgtgggcgtaggcaaatccaccatgcaggccatggtatacgcttccgtggccctgctcatcgccaactttatcctgaccatgatcctcaactctttcttccccatgggattcatgagatagcctttccccgccgccatgcagccattcatccgcgtccatcagctcagacaaagcttcggcacccaggaagtgctgaaaggcgtaagctttgacgtgggcaagggagaactgatggctttaataggaggttccggagccgggaaaagcgtcattctgaaacatctggacggcctgatggaccctttggacggctatgtggaaatagacggcaggcgcatcagcggcgcgccggaaaaaatcaaaaagcaaatccgcagcaacatcggattcatgttccagcagggagccttattcgattccctgagcgtgggagaaaacgtagccttccccctgcgggaggcggggatcagggatgaaaacgaactggacacccgtatctcagccgctttggattccgtaggactgctgggacagcaggaaaaaatgccgaccagcctctccggcggcatgatcaagcgcgtcgccgtagccagggcaatcattaccactccggaatgcctgctctatgacgaacccacagcgggcctggaccccatcgttacggacagcatcagcttcctcatccggcaaatctgcaaggacaaaggcatcaccaccgtcattgtctcccatgacatgcccagcgtgatccgcatcgcggacaaaatcgtctatctcagaaacggtgaggtttactggacgggaactccggaagaactgttgcactccaaagacgaaatcctgcaaaaattcctgtacggggactccggggaaaactgggcagccctgtccggcaaaaatgaaaacttccaacgggttctgctggaacgggcggaacgggaacgcaaacaataaccatcttgccacagagccatgaaacagaaacttaaaccggaaacctgggtaggcatctttctgatcgccgggatcctgatgattatcggagtcatcctgggattcggcaacatcaaaacatccaaggagcaaacctaccccatcaacatcattttcaaagatgcggcggggctcatcaaggattcccagatacgcctgggcggcgtcacggtggggaaagtcaccaaagcccctgaactcctgccttccggcaatgaagtcatgctggaagccagcatccagagcgacgtgaaaatccagcaagggtccgtcttccgggtggacatgcagaacatcctgggcgacaaatacatcgatatcgtccctccggcccagcccacgcatgaatacatccttccccatgccaccatcatcggtcagccggaaagcgatttcagcaaaatcaaaaacaatgccgtgggcgccacagaggaaatcctgaaaatcctcaagcaaatcgagaaaaattcggacaacattgacgacgccatcctcaatatcggagaggcggccaaagggctggcccagacgaccaggctgatcaacgagggcatcctgaaccgggagaacatccagaacctcggcagcgtactgtctcaaataaaccgggcgggagaacagctccccggcctcatggaagaaacgcgctcctcggtcgcggccatgaaagacaccgtccgggatgcccgcaaactcattgccggagctgaagaaaagctcaacactctggaccccgccgtcaaggcaatcccccctacgctggccgctctgaggaaagcatctgaacaaatctcctccttcacggctgatgcacgtaaaaaccagggctttcttgggctgcttatgtacgatgctcgcttccgggccaacgctcaggaattcatccgcaatctgagggattacggcattctgaggtaccggaatcctaacgaaccccaagtcaaaccggacccccgcggcggtttttcaggaagccgccgctgagagaccgcacaattccgggtgaagccgctttacacacttgccaatagtgggaagcgtgctaaataatttccaatgtgagaggcgaaaacatgtaagtcgacatgtttttcaacaggaaccaacccttaatactctaatcaaccatgcaagacaaccaaaccgaacttgaaacgaccgcagcagcaaacgacacttcctgctcctgcccttccgcccgcgagcttgccgtcaccagatttcaacaggccagggccttcgccgcagctaaagtaaaccaaatccgcaaggcggctacggaacaggccagcaccatctgcgactacgcccaggaaaagggagaagtcatccgtgacaaggccaagaagttccacgaagcaggcgaagaatacgtgaaggaaaaacccacccagtccgtgctgattgccatgggcgtgggccttctcatcggtctgcttatccgccgtcgttaatcctctcccttcatcccgcgccatgcgtgccatgcgcatggcgtcctccttcccctttcaaaccgaaccatgggactgatcgacaaactcaagcgaaccttcgtcaccccccttgtggaggaaaaggaagaagggatggccatggtccggtccctccgggaaaccgggacggcagccctggcccatgcggaagccctggccgcgctgctcaaactggaactgaaggaagcgtccagcaggctgggcaaaaaaacggcctttctcctgatgggcgccttcatggccttcttcggctatctatttctgtggtgccttctgactgtggtcatggcgtatttctggggaatcatcgccgggcttgccgtaaccacgggctttcatctcctggccgccgcagccgggttcatccttttcagccgaacccatgtaacgcctatcgctccggcgacggcggaagaacttaaaacggatttatcatgtctgcaaatggctctcaagaaaagctcgcactcctgatgcgggtggcttcctcccggctggacatcgtcaatgaggcggacagcctggtgcaaaagacgcagcagcaggccgaccacttccgtaaattgaaaaaaaaggccatgtccctgcctgtaatcggctctattgtcggaacggtgggaggcattcttctcatccgcatgtttgcggggaaaaaaagcaatccggcccctcccccgcagccgcgcacttccggaagctgggttaattcctccatcttccgtttcatcgttgaaattctgattaccctggctttcccttccctgaaaaaaatggggatcggcctggccggcaaaaaattcctcaacctgttcaaataacaggattttcagaccaatacagcggttttctgccgcttcttgaaaaaggttcgggaactccgctgccgtaaaaaatggggatgttcccgcgccgttgaatgagaacctccccatatccttcccgtcttccagggaacaataaatcatgcctggcgtaaaaagccggcctgccgcgccagcccccccgttccatcatcctccccttccccggaaacaaacgcccgcagctcttccgcagaacttcccctctcgaaattcctcacccgtcgcggaacagggcaaagccgctttcacggaaatcggtacccagacattttttgctggtcaaaaaagctctgttttcgttagtatgtagctttatcagtttgctgcattcacaacatgagcgaatacattttgccccacgtcgacggatatctcaaacttggacaggattatgactgttccgatatccaccttgccgtcaacagccgtcccacctggcgccggttcggccagcttctccccatctgggaggaagcgcccaatctcacgccccaggacacggaagtgctggcgaggggctttctggaagacccggaatggaaccgccttcagcaacggggggacgtggacttcgcatacgccaatgactttggccgctaccgcgcatccgtggttaaacagcgcctgggctatgacatctgcttccgcatcatcaacacgcgggtgcggaccatggaggaaataggcctgccgacggaatacgtggtgcccctcacccgctacaccaacggtctcattttagtcacgggctccgtaggttccggtaaatccaccacgctggcctctatcgtggatttcatcaaccaggaccgccacgaccacatcatcacgcttgaagaccccatcgaatacctgattccctccaaaaactgccacgtcaaccagcgcgaagtgcataaacacacggaatccttcgcgcgggccctccgcggagccctccgtgaagaccctgacgtcatcatggtgggcgaaatgcgcgacctggaaaccatctccctggcgctcacggcggcagaaaccggccacctggtgctcggcaccctgcatacgggctccgcagcccgtacggtggaccgcgtgctggacgtcttcccggtggaacaacgcgaccagatccgcatcatggtcagcgaatccctgcgcggcatcatctctcagcagctggttcccagagcagacggcaacggccgcgctctggccattgaaatgctggttaatacgccggctatcgccaactgcatccgcgaaggtaagacattcatgattcccggctgcatccagacagggaaagcccagggcatgatcctgatggacgactcgctccgggccctgcaccaggcgggcctcatcaccacggaagactgcatcttccgcgcagaagacaaaaccatcatgaaatccttcctgggaatcaagtaacctttaattttgaaacactcctgttatggctgtcatcgaccaatacttcaaatacctcgtagaagcgggcggttccgaccttcacctcagcgaaggccagcctcctaaagtccgtgttaacgggaccatctccgccatctccgacgaaaacctggaaggccaggcgttcaaaaaccttctcgctgaaatatgcgatccccaggccttccagaaatatctggaagaaggagacctggactttgcctatgaaatggatgaaacatcccgtttccgctgcaactacttcaagcagcagcacggcctgggggctgttttccgcctcattcccaccaaaatagccacgctggaagaactgggcgtgcctacggtggtcaaggaattcgcccatatgagatccggccttgtgctggtcacggggcccaccggctccggtaaatccaccacgctggccgctatcatcgactacatcaacagcaaccaggcgcggcacatcatcaccgtggaggaacctatcgaattcgtccatcccaataaaaaatccatcgtcacccagagggaagtgcctctccagacgccttccttcgcagacggcctccgggcttcccttcgtgaagactccgacatcgtgctggtgggtgaaatgcgcgacctggaaaccatctccctggcgctcacggcggcagaaaccggccttctggtattcggcaccctgcacacgaacaacgccagcaaaaccattgaccgtatcattgacgtattcccgtccgaccagcaatcccaggtgcgcaccatgcttgcgggttccctccgcggcgtcgtggcgcagctcctgatgaagcgcagcgacaaaccgggacgcgtagccgtcaatgaaattctctttgccacgccggccgtggcggccatcatccgtgaaggcgccacgcagaaaatccctgacgtcatcgtcggcggcaaggccatgggcatgcaattcatggatgacgccatctggcaaaaactccagcagggcatcgtctccccggaagaagcctacatgaagtgcattgaaaagaagagattccgcaacttccttcctccggaatccgcccgcctggcagactccggcggcggaaactaagctctttgcccttcttctcctgccatgtctcccactggaaaattcacgctcaggcttgtgatttatggagccttcctgctctatctggtgggagacttgtttgtctggcacggctttctggtaagcaggatggacgcgtacctgaaaccgttgccagggccgccaggagacagctccgcccggatagcggaagtgtacggggaacccgtcaccgccaaccagctttcccgaagaattacggaactgaaaatgctgcgccagcctcccgtgctggatatggaaggcgggatcaaacttactcatgaaccggacatccccggcgacctggctccgcgggccaggtatgacctgattggctcctcccttctgcgcctgaaaaccagcgtcaatgacctccagctccccaaccgcaacgcggaagcggcacgcgccgtggaacaaatccggtcccgttttgacggagacacggaacaatacctgaaaaccctgcatggtcagaaattgacgcaggaacaatttcaaaaaaaaatagcggccaggctcaaacagacggaacagctctaccgggcaaccgcccaggcggcggaagcgtccgacgaagacctgaaaacctactacaacctgatccgggaccagctcacccctcctgatctgcggaaaaccaggcacatcttcctggctaccctgaacagggaagaagcccaggtccggcaaaccgcggaaacgctgctggagcggctgaaggcaggggaatccttctcccggctcgccagggaattcagtgaagacgaacgttccgctcccgcaggcggggaactcggctggataagccccgcccgcgccaaggaaaccctgggtctggcgttggcagacgtcccggacaacaggccggtacttctcaaaagccggtgggggtggcaccttgtggaagcatcccctgtcaaaaaagggaaaacgccatcctatgaagaagcgcttccggccctgagggatgcagcccggagcctcagaaaagctcaagccgtgggattgtacatggacggcctttttgaagaagcccatctcaggaaccgcattaaaaacaagcagggccgctgacgccccaattccggcaaacgggccttcgcaaaaatcggaaacatcaggcccgcctgcctttacacctgaacattcccgcaggccctccggcttccagaccggggcgttcctcctttcccgtaaaagccgggcgttctcggaaatagccatcttccctgcggacggcctccggcagtcatgaaacacccgcacgagatgaggaaaggcggcatcttccttcttatttgcctttcctgacgaattccgcttgctttcaaacgcgggatgaactaaattctttccggtatttcccacggggtattagctcagttggtagagcgtctcgttcgcaatgagaaggtcaggggttcgaatcccctatactccaccatccatctctctttcccgctactgttttttattcgggaataacgggtagccttatgaatggtaacttatttaaaattgtactggtttcagtcgttgccattcttttagccatcataggcggcatcatgtcggcggacggcgatcccttttctatagttctggctgtttccccctttatcctggccgccttattcctgatgaagggaaaagtgtggtatctgtggatactgatacccattcttttcctgcccatcccctccttaagggattacgctccccttcttgcttacggaataacccttccttgttacttgtggaacgccatgctcaggcgttcaagcttgacgtggaattccgccccccttctggacgctgtcgtcctcgtgctgttcatgcacgtgggctatatcttcctgagccaccctttcgctctggggctggatgtgctggaagactactacggaggcaagggatacatccttttcctccaggccctcctggcctatctctgcctgtcctcgttaaaaacgaccagccatgaactgggcaaggtgcttcaatgggctgttttcctgaccatcgtttttacccttatcctaaccgcccggagcctcctttctccggatagcgccggggcggatcttgccgcgagcgcgggctccgcaggcacactctccgaaaactcccggaactcttccttcctcagaatttctatcttggtgatgcagctgctcatcatcaactactccgtgtggcagatgatcaagcgtccctggtggggggcgttacttcttcttggaaccgttggcatcctgttaagcggatttcgctccgccatggcccaggttctgttcctgttcttcaccatatccctaatttacagaagatggttcttctgccttctggctcccgtcctcggagtgctattgctcttgctgctctcctctgcgggcatgctccattctctgcctttcggcatccagagaaccctctcagccgttcctttcctggacgtcagcgcgcaagccaaggcaaacgccgaagactccatcaactggcgctttgaaatgtggagctgggctctggatgaccgtgaacactttattcaggacaaaatattcggagacggcttttcacgggatatcagcatcgtgaaagccaatgtgtatgaagaagcctacaacctgagcaaagaccaaagcgcctttgcgtggaacggccaatggcacagcggccccatttccacgattcaaacgctcggctacatagggatttccctgtaccttatcctgtccgtcgttggcatgacctacgcatggatcgtcagtagaatttaccgcaaccatcaatacaagctcggcatcctgtatgtttccgccgtctatttcaccaaaccaatcttctttttcctgatctttggggaaagcatcaccattgcgatggacatcatatccctggccatcatcaaagtactctactcctgcgccaagagggagggcctctatgtatcccttcatgtccgcaaggaatacatgccgctcatgatccggaaaacgcaggaaaaacggcaagccgccgcaacggcatccatttccggctgactgttccttcccgggaaaaacaggcgtcccctatgcttgaggctggactaattcaaagggagttgctacctttcggggcggttccttttcccatggcagcagatacttcccatcatatcatcggcctcattccgtcacgctggggttcctccagatttccgggcaagccccttcatcccattgcaggaaaacctcttgtccagcacgtatgggaacgcgtctgccgctgttcccgcctggacgccatcgccatcgccacggacgaccagcgcatttttgacgccgccgtatcctttggagccagggccatcatgacctctccggaccatcccagcggcagtgaccgcctggcggaagcggtacgttccttccctgccgccacccatatcgtcaatattcagggggacgaacctctcattgacccggccctgattgacaggctggcggaagccctggtctcggacgaagccctctccatggccaccgtcgcctgccccatcagcacccgggaggatctggacaacccgaacattgtcaaagtggcccttgcccgtaacggagacgccctgtacttctcccgttccgtcattccctatgcccgccacccccgcgtagcgccgcctttgcgccatctgggtatttacgcctaccgccgcgacttccttgaaaactatgtgcgctgggccccgacccccctggaacagacggaatccctggaacaactgcgcgcactggaaaacggggccagaatccgggtcatcctgacggaccacgtcagtgtgggcgtggatacgccggaacaggcggaacaggtggaacaaatcttattaaacatacactaggaagcaaatcatgaaatatatcttcgtcacaggcggtgttgtctcctctctcggcaaaggactggcggcggcatccatcggcacgctgctggaacgctgcggactcaaggtaacccttcaaaaatctgacccctacctgaatgtggaccccggaacgatgagcccgttccagcacggggaagtgtacgtcttgaacgacggagcggaaacggacctggacctgggccattacgaacgcttcgtccattgcagcctctcccggctcaacaacctcacttccggacaggtctttgaaagcgtgctgcggaaggaacgccggggagactatctgggaaaaacggttcaatacattccgcatgtcacggatgaaatcaaaaaccgcctctatgaagtcacggaaaaatcagacgtggacatcatcatcacggaaatcggcggcacggtcggggacatggaaggccacattttcctggaagccctgcgccaattcgccctggaagtgggccgtgacaacgtctgcttcattcacgtcaccctgctcccctatatcaaggccgccggggaaatgaaaacgaagcccacccagcaatccgtcgccaagctccgggaaatcggcatccagccggacgtgatcatctgccggacggaatacgacatgagtgaagacgaacgccgcaaaatcgccatgttctgcaacgtggaagccaaaaacgtcattgccttccgcgacgtcaaaaacaccatctacgaatgccctctggatctcagccaggataaaatagaccgcattgtcaccaggcggctgggactggacgttccggcgcccaatctggcggactggcagcgttacgtcggcagggtcatcagccccagccactccatcaggattgccgtagtaggtaaatacatcgctctccaggacgcctacaaatccatctatgaatccttcactcacgccggtgcggaaaatgacgcccgcgtggaaattctccggatagacgcggaagaaattgaggaaaagggcgcggaggccatgattgactccgtggacggcattctggtgccgggcggctttggagaccgcggcattgaagggaaaatccagacggtggaatacgcgcgcaccaaaggaatcccgttcctgggcatttgcctgggcatgcaggtggccgtcattgagtacgcacgccacatctgcggcatggatgacgccaactccacggaattcgaccagaaaaccacccaccccgtcatcagcctccaggaagagcaaaaaggcatcaaggccatgggagccaccatgcgcctgggcgcctacaaggccctgatccggcccggaacgctggcgcacaagctttacggcaaggacagcgttacggaacgccaccgccaccgatacgaattcaacccggcctaccgcgacgaactggaaaacgcggggctggtcatcagcgccgtcaatgacgaacacggactggtggaagtcgtggaacttcccgatcatcccttcttcatcgcctgccagtaccatccggaattccagtccgctcccaaccgggcccacccgctcttttccggcctggtttcagccgcgctggagcacaagagccactcctgaccctttcattaagcccggggccttttctggaatttccattccggaaaaggccttctctttccaggcatgctcacggaccttttcgtcatcgtcatttactttctggctatcttctgcattggcatttatgcgggacgaaagcaaaactccctgacagactatgccctgggcaaccgctccctgccctggtgggctattctggcctctatcctggcggcggaaatcagcgcggccaccttcctgggggctcccggagaaggataccatacccgcaacttcacatacgcccagctctgcatcggcaccatcctgggccgcatcatcgtcggcaggctctttctcaagccctattatgactacaaggttgtttctatctatgaatacctggaaaaaagattcgggctcctgacgcggcggacagcctccatggtcttcctgatcagccgggtgctcgccagcggaaccaggctctatttcgcgggcattctgctggtcattgcctaccagttcctgacaggcgtcacggcaaacgccgaccagattgtcctgctctacattgccgccctggttgccatctccgtcgccacgacaatttataccgcgatcggaggattgaaagccgtcgtctggacggacgtcctccaggccgtcgttctgggagtttccatgctttccgccctgtgggtactgttctcccatatccccggagggtggagctccatctccgccgccatgaatggtggagacgattggaaattcttctcctggggaaccggagaaggcctggacttcctccaacaaggcgcccgcgtgctgggccaggaatacacggtgtgggcagccttcctgggagcaaccttcatcaccatggctacgcatggcacggaccaggacatggtgcagcgcatgctggcggcaaaaaacagcaaggcgggaacgcgtgcagtcatcgtatccggcttgctggacttccccatcgtcatcattttcctcttcacgggcattcttctctatgtcttctaccaatacaacccggcaaacctccctgcagacacgccgcagctgcatgtgtttccctacttcatcatccatgaacttcccaacggcatccgcgggctgctgatcgccggacttctggcgacggccatgggctccctctccacggctctaaactccctggcgactaccgccaccaaggactggtaccaggggatattcaaaccggaagccacggaacggcagctgctccggtgcgtgcgctggggaacggccgttttctccctgctgctcatcctcgtgggttccatcacagcgtggtatgtggtgcatcacccggaagtccgcatcatccaaatagccctgggcattttcggctatacctatggctccctgcttggcattttcctgttgggaatgctgacccgcaccagaggcagcgactcaggaaacatcattgccatggcggcaggattctttgtcatcgctttactgacggaactcatccctctgccctccggctggcaacaatatgttccggaaatagcatttccgtggcgcgttaccatcggaactctggttacttttaccgtcggcttctgtttcagaaaacgccgccttcccatgcgctgaacggtgaacgccgttacttggccacgttcatgttccgcattccccttcaaaccgccccgtcaatgggagtaaaggtgcaagcgaaaaataggggattaggggataaaaatccctgagggagggcgctccctgtccaacgggtgcgccggaactccttctaccggacacaaaagcgccgctttcccggaaagggaaagcggcgtgaaacggaatggaaacacgctccctccgctacacttcttcgggggacagccagcggaaggaaacgatgttgaactttcttccaaacgccttgttcacggcgctcagctccgtatcctccagcgcgccgctcttcatgttgacctgccgggccggagtttccgggctgttcaccggatccacgtagttgattcccctctgcaccaccgcttcgcaccacgcgcgcgacagcaccaccccttcgcggttggccagctctccgtaggcgcgcaccgtaaacgtatcgtccctcgtcgtcaggatgttgcccagaaccgccagcacatcagactggatcaggtagccgggggcggccgtatacaccgatcccctggccgcgtcctggttcgggtagcctcccttgggcgcgatcaccatgtcggaaagttcgtcaaacgtgctgttgatggagctctcgtcaatagccgcctgaagcgctcccttcacccccatttccccgctctgcagacggcggttgacaaagtcggacatgttcaggaaggggcctctctttttgacctccttgaccatgttccgggccagggacctgatttgcgtgtcgctcagggttctcaggtccgaccacgccatagcctccccgtccgggatgccctgggtcacccctatcgaaccatagtcgtccacgtgggacttgtcgctgctggccactccgaaacgggaaaaggacgtctgggagttgttgagcacggagggcctgccgctcctggaatagagaatcttgcgcttcttgagccccagcagggtggcttcccaggcgcgctgggaggtggagttgacattgaatcctccggcgacggtgaggtacttggaggcatgcttgtagccttcgtccgttctggcgagttcttcgacgacagcttccgagggtttaccctgaaggtcgggcaggaagcggcggttggcgatacctgaagccctgttggatgaggcgtccgtagagaaagcctgctgaagcacgattttaagttcttccctgcccgtgcccccaaggctggaaggacgggcggccagggaggaggcgaaccaggagtcccagagggcgtcgttgatcatcaggccgtggtcccagaagtcccccagggcggcgtcccccatgatttcgttgtgggagaaaaccttgtcggcaggaagcatgggatcggcaaaagcattgccgatgcctacgcccggcacgccggactggtaggcgaagcgtttggcgatagccgccctggagtcgctcctgtaccatcccggggtgaggcggcatccggcaaagctagccaggctggagggctgctggaagggaagctccgcggcgacaattttgttgacctgctcggctcccggccctccgaagggggagagcctggtgccgtcattggagaggatgttggagatggtaatcgggaagaaatcgctgttggcgttcttgacttcaaactggtacgggctgtagaggcgccccagttcggaggcggtgggcatctggcctccccagaaaagggggctggagtgctgccatgtcttggcccggtagtccttgccctccggataggctcctatcacggggggcttgccccattttaccgatactccatagtaggcgatgaaataggggaatggaccgttcggctcaggttctgcgtatttgccgcgtttcgtaccatcttcatcgtcatctcttttgaagttaatccatccatctactggtatttttgtcgcctgcatgatttgttcctcaaatccccagttcagattgagcatcgttggggacatcttagaaaaaacgacagggtccggtgtggaagccccgcttaaacgtgtatcttttccaatttggctggcgtccataatgccagcacccatcatgaaagttcccaattttttggaattggagttgtattcgtccgtatacttatggcacagaacatgattgggaggagttcccaaggaggtatttcctccattccctatcaggtcattatccgtttccgcaaagcgggcccaaaacgtgtacttattctctgttggatagccagatctttcaaagtattgatattgaagacctgtgtatatattaacgccataagaaaccatctcactcatgtcttgcggccacccttctctaaaagcaaaattatccgttcgaatatcatatcccccacttttagatttatatacagcaccattttgaattttgttggtacgagttgtagatggttgagaaaaaacaacgatttctcctgctttaagaacagatacctctcctttcactacttctcctgtaccgtcgttcagccgggaagttttcctgtaagaggcaccgaaatcggctacctgccgatcatgtatagctccgaaagccccttgcgtatatggcgtcaaaggatgctccgtatacatttttaagctggaaagaggtccagaggaagcgatgttatccgcaaaaagcatgggtttaaaacgatgttcgccaaagtaagagccccatggatttcctccggctccctgaaatttcatgtccacattatacggattccaccagacataaacaggaacgactgatacagctgtgttaatccagcctccgttttgagattgccgatcattctttgttaaataagaaccgataaaattgtaataacgcagcaggatgggatggcgcatgtacgtgtagcggttgtccatcatctccaggttcgccgcggcatccgccgcaatcagcgtgctgggagcgcttccgttccactgaagggtggcggaggcatcctggccttccctcttcgtggaggagtcccacacgttcgcccacaggtaaagctggttccaggagccaatcggccggttccggtccgacgggttaccgtcctcggacgtgtacggacgcaaccctatgtccgccgtatcgccacgaaattccgcaggcagtttttcttgagaaaatatgatattcaagtctttttttaatccaccgaatttagaatccgtcagcaaactggaagaaaccagagagatgtcgtggtaaacgtcacccaaatccttcaaacgtccgtttttattgttggccagcagagaatcaagagagataagctttctgactgcggacatgtcgttcccggatcccgccgtcattacggaagaaagattgagagactccagatcggggccgggcgtatcccaggtggaacgcagcaccgtcagggcatccgtactttcttcagaagcatgcggcatcaaattgatacgcgctttctggttttcccccgtgacccaccaggctatatatttacgggagttagcattctttttcagtcctgtggtcttggaggaatcatctacgcgcaccatgcgggcgtagatttcctttttatcctgattcctggctccaacgggtgtccctatcgtgcctggtcccaccagggcgacgctgcggaagttctggttagagagagaacgtttgcccaacaggtttttacccgcttccagagaactgagcctgcgcaaatcagggtcggaaatgagccagcggcggaacatggattttcttcctgtatcataggtggccgagatgttcataccctcggagttattcgtattgagccaggaatcccagctgttccagacacccagaatataaggggcgtttccttcgctggttccggaagaaagaatgccggaattggcggaaacacgctggtcagggcccaattcacactgaagctggcccaaagctacttccagggaaaatctggcgagggatttggcctccgccgcaaaaagctgtttctcggaaatacggacctgtgaagatgcaatggttaaaaggccgacgctgaggagggctaaaagcatcatcagggtaatggtggcaatcagggcaaaccccttgctgacatgcctgacaggacgtttagtgaaaagtttgatcttcatgaaaatgatgggtttcggcaggcccctttccgttcgagtgtgaggaggaaaaacctctgctgtcacaaaggtgcgaagagccaattcttaactctagccaatacaaaaaagaggcagttcatgcaagctcaaagttggttcaacagggcacacgttgagcagagcaaacaggctccgggacaattggaaagaaaaataaggcaagaaaaatcgcatttttatccaattccgttcttaaaggtttatattatgatttttatagaaaaatcggattctaaattcggcggtcttaagaaagacctcaacattatgttttcccaggaaaaacttcctgaagaatttcgcggcgatacggcggacatagggttgcgtccgtacacgtctgaggacggcaacccgtcggaccagaaccggccgatcggctcctggaaccagctttacctgtgggcgaacgtgtgggactcctccacgaagagggaaggccaggatgcctccgccacccttcaatggaatggaagcgctcccagcacgctgattgcggcggactccgcagccagcatggaaatgatggacaaccgctacacgtacatgcgccatcccatcttgctgcgcttttattcctttgtaggacttaactacgtcaaacacggcaacaagcatcccaaccgtggaggatggatcgacttccgtattgccgtcattcccgtgtacgtctggtggaatccgtataatgtggatatgaagctgaccggggccaacggaggtgtctggggcgcctacttcggcgagcaccgcttcatgcccctgctgctttcccataatgttaaattcgcatggaaccaactggatgagaatgcactctccaattatggagaatcctgcctgatcccctatttgaacgcttcttataacaaccgccaggtggcggatttcggcgcctctttccgaactacggccaaacttaacagtgacggttccaccgtcaagggagagccttccaccttgaaagcaggcgagatcgtcgtctttgcccagccggtcgtttccaatatcgccaacggtaacgaagtttacaaaacaaagcccaacagcggtgatttcaaaccggacagattcccgctcaaagagggatggtcccaggaaccgggacaagtcagctcttatgccgtcaacctgacggacggcgtccgttatgaacttctggacggcagcggatataaccaggtaggcattgccaaggcttccgttatcttcgcggaagataccagcaagctcaacggaacgccggacaatcatgttctcgccgtcaaatacggagacaagggtgcctccaaagccctgggaaccttcgtgatgggggccggcctgatggatcccaacaaaatgaacagttcctcttccctgaatgggaaaagcacggcggaaatagaaattttctccaagaccatgccggccatcctcaacctgaactggggtgcctgggaaaaacctcttgttgaccaaattaaacttcccgcagaaatgtgggaacgcaacgaagggaccaatgaagaagctaaaaaagcgggcgaatacggcacgccctctttggactccacgtttgtcgcctactatggagtatcggtaaaatggggcaagccccccgtgataggagcctatccggagggcaaggactaccgggccaagacatggcagcactccagcccccttttctggggaggccagatgcccaccgcctccgaactggggcgcctctacagcccgtaccagtttgaagtcaagaacgccaacagcgatttcttcccgattaccatctccaacatcctctccaatgacggcaccaggctctcccccttcggagggccgggagccgagcaggtcaacaaaattgtcgccgcggagcttcccttccagcagccctccagcctggtcggctttgccggatgccgcctcaccccgggatggtacaggagcgactccagggcggctatcgccaaacgcttcgcctaccagtccggcgtgccgggcgtaggcatcggcaatgcttttgccgatcccatgcttcctgccgacaaggttttctcccacaacgaaatcatgggggacgccgccctgggggacttctgggaccacggcctgatgatcaacgacgccctctgggactcctggttcgcctcctccctggccgcccgtccttccagccttgggggcacgggcagggaagaacttaaaatcgtgcttcagcaggctttctctacggacgcctcatccaacagggcttcaggtatcgccaaccgccgcttcctgcccgaccttcagggtaaaccctcggaagctgtcgtcgaagaactcgccagaacggacgaaggctacaagcatgcctccaagtacctcaccgtcgccggaggattcaatgtcaactccacctcccagcgcgcctgggaagccaccctgctggggctcaagaagcgcaagattctctattccaggagcggcaggccctccgtgctcaacaactcccagacgtccttttcccgtttcggagtggccagcagcgacaagtcccacgtggacgactatggttcgataggggtgacccagggcatcccggacggggaggctatggcgtggtcggacctgagaaccctgagcgacacgcaaatcaggtccctggcccggaacatggtcaaggaggtcaaaaagagaggccccttcctgaacatgtccgactttgtcaaccgccgtctgcagagcggggaaatgggggtgaagggagcgcttcaggcggctattgacgagagctccatcaacagcacgtttgacgaactttccgacatggtgatcgcgcccaagggaggctacccgaaccaggacgcggccaggggatcggtgtatacggccgcccccggctacctgatccagtctgatgtgctggcggttctgggcaacatcctgacgacgagggacgatacgtttacggtgcgcgcctacggagagctggccaaccgcgaaggggtggtgctgtcgcgcgcgtggtgcgaagcggtggtgcagaggggaatcaactacgtggatccggtgaacagcccggaaactccggcccggcaggtcaacatgaagagcggcgcgctggaggatacggagctgagcgccgtgaacaaggcgtttggaagaaagttcaacatcgtttccttccgctggctgtcccccgaagaagtgtagcggagggagcgtgtttccattccgtttcacgccgctttccctttccgggaaagcggcgcttttgtgtccggtagaaggagttccggcgcacccgttggacagggagcgccctccctcagggatttttatcccctaatcccctatttttcgcttgcacctttactcccattcatgtacttcacaagggataaaagcccgtcaggggcctgccatcgcgctccgctgcgcggaccgatgcccatgcccttccgcatttcctctatgcggttatccgtcaaagggttatgcaatgtatcaaaactttttccattccccagaacccagaatatatgcgtattttacccatcctggcctttacctgccttttcggaagcatttccttcgcccaaggacaaagccgcaccccctccaggccggaaccggcccaaccggcagcaaatgctccggcggccgatactgtggacaagtccctgccgccagccgccgtcaacggcatccggttcgttctgaaggagcccatgtctcttccttctcccatttacatgcctattgattccaaaaggctggaaaaagtggaaatccgcgccgcccttccgggacgccgcagcgtttaccccaggagcaagatcattaccctgttcgggggcctggaccagaaaggcatgccgaccaataaactcgtcagcaagcccctgccgcccgatcttggctccaaaaccctggctctggtcggcaaaaacagcaaaggggaattgacgctggattttattaatgagtcggaactgccgctgaactgcgtttacatccagaacctgaccggacgcacgttcactttggaacttcccaaacctccctcgggagaaaagagcgctatcgaactgcccagcaaatccacttacattttcggcaagaactctacagacagcaacatttcccgcaccacccccgccaatttgacgtacatgacccgtttaaagaacggcaaagtcgtcaaggtgaaggacagaggcatgatgctgacgacctacccgggacgaaaagtggtcatgattatttccccggattccaccggccgcaccgtcgttttgacggaactgatgattttcaaggaaaggccgggggcggcttcctctgacaagtaaattttcttccgatatccgggaagccggaagctgctctggagtatatccggatgattcagaaaaacgggcattgctgcccgtttttttatttttcttctcctgacgccatggattgagggaataaaccactccggacatttttccggcacgagaacaatgtccgccctgtttcccgcggctccaatgcggcagactgaggaagaggtctcgaagccatgcgatttgccgaaaaagttcacttgccgccttccggcatccgggcaggcttaataaactttgggcaccaggccctgacggctcatcttatcctccacctttcgccggttttcctccagacgccgggcatcataggaatcatccacaggctgggcctccggaatgttttccccgcgtcccgcccggtattgctgcacctgcgggagcactccttccaccagttccctgcatatccaggaaggcaggatataggtctccgtgcgtccggcccggctcagagccagcccaacaaattttccgttgacgtcaatgaccgggcatccggcccgttccgggaacaaggtcatgtccgactggataaccaaagggaattcatcccttttcaagctcatccggttgcccatggagttcatcatgtcgagacgcttttgcgggaatttcatcaccctgggcctgggccccgtgaggagttttccttctatcacctggttccgccgccttacttccacgggaaccgtctcaccgggacgcaccccgaccatggcggcacggatggagtacattccgtccaccggctttccattcagcttcatcagcacatcgccggccgtcaatccgctgcggtgcgcgccgcttccggcttccacgccgcctatcatgaccccctccccgtcccagcggggatcggaaacgatgccgagataaggctggtcatccgcccgcaggctgcgctgagccacggaaacgactccgaagtcgctcacatgccctgtgggcgatacggctgcaatcacgtccccttccttcgcctgcacataggaatccaggtcaatgggaggagcgggaagccccggcacatccatcatcagcagatcatgctccggaagggcaaagagcaccttggcgtcataaacccgcccggaagaatccaccagcatgaccggacgccgttccttctggagatcgctcagcttggtgaggacttttcccttccccactactgttcccaaagccacctgggtattgccagcaaccagagctactacggactgccccaccggaacagccaccttgtcccattcccggaaaatctccttggcctggctgtccagcacgcttttgtcctccggggcaatcatctgctccggaggcagcggggaagctatttcctgggcatacgcggaagccgccgcaaatgccgcccataaatatttcatcatcatccttgagtttgttcctggtatttcaggccggacatcaggtcgccgcgcctgccgaatgtaagatccgccttgtaagccgtacctttcctcaccaccaccaatggaacggtttcccccggacggtgcctgcccagttcacggagcatatcccggacggaacgcaggctccggctgtccatgtgggtaatgacgtcccccggctggatgccggcggtatccgccggagaattcaccacaacgtcttccaccaccacgccgtccacgcccagcacatccatcatggcaaacccgagcacaggagattcggggtccgccatgggatgaaggcccagctggccccaatgcctgccggagagcagtttgtcccagtctctcctgaaaacggaaacagggacatggttgttgattttcaacatagggccaatggaggaatggatgccaaccaacttgccggacaggtcaaagaggggaccgccggaatctccgccaatcagcgtacattccgaaataaggaagcgctgctttccgtccgtgcacaatcttcccatgcggatgggcgcgcggcgttccgggtcaaatcccttggaatggcccagagccaccacaaaatcccccacatgaagaccgtcggattcccccagttccacatgaggatagttgcctccgtccatgatttgcaccatggcggcatcccgcgtgaagttggcgcccagcacccgtccctttaccacgcgcccgtcggcaaagaccacacgcatgatttcatcgccgcccacgacgtgggctgccgtcaaaatcaggccctgcggagagacaatgacgccgctgcccgtctctcccccgtcggaaaccagagccaccgtagcagccgtaaccctggaggccacctcatgcacatgtttctgcaaatccgccatggaagaaacattccccgcaaggctcgccccccctgacagcagggacacaagccccccaacgaccaagcaacaaaaactcgtcattctcaatagtgatatcatgaaattaccgataatcgaatgataggacataccctactgtataaacgttcaaaacggcagaattttgtctatggattgcgacatggcgccccatcttttgcttagaccatttcgattatttatgataaagtccggcccacggatgggtttaaacgacaaatcaaggaaacgaaatgccgcctcctggagggaacgcatccaagatggagaaatgtcttcccgttcccagacagaacgcaaaaaaaggccccttccccgtccatcctatcccgggttgccgcaggaaaattctgatccggccgtcattcccggccctacccgcagaacgggaaattcccgcaacggcccttcccggtatgacacgccgccccagcgacgggcctcccgcccgtctccgaaggaagagtacgaagaaaatccggaaagagaagaagaaaaccgtcccgcacgcgcaggaaccatgcgcaggccgcgtttcacgattttcggagccctgctgtttgtcctgctgatgccgttccgcttcatcggctccctgacgcggaatatccgctggttcatttgctggcccctgcgcatccttctgggatgctgcttcgtcggcattgtgatcggggccatcctggtatttctttacggcaccatttccaaccgctatgacatttccgaggtaaagagcaacatcccggaacgcacggtgattctggaccgtaaaaaccggaccatcggaaccctgcacggggaaaaccgcaagcgggtatcccttcaggaagttcctcccgtttttattgatgccctgctcctgcgcgaagacaaccgcttttacgaccatggcggcgtggactggataggcgtgggccgcgcctttgcgcaggtgctcaaacacaagagagccacgcagggggcttccaccctgacgatgcagcttgctaaaattacatataaccaccgggagcgcaacctccattccaaactgacggaagtggccctggcgaaacgcattgaagccacttatacgaaggacgaaattctggaaacttacatcaaccgtattttctggggacacaccttcctggggatagcggcggcggcgcggggatattacgacaaggaaccccgggatttatccctagcggaatgcgccaccctggccggcattatttacggcccaaatgatttttcccccatcaaacatccggaggaagcaaaaaaagtgcgtgatattgtccttggcctgctgaaaaacgaaggcaagattacggaagtgcagtatcaggcggccctggcggagcctatcgccacccggacgccccagtcccggtctgaggaaaattacgccatgggtctcgtgcgccgggagctggacgccattctggaggaagaagacatccgcctgggagggctggtggtgcataccacattggaccttgatctgcagaacgccacgctggacgccatcaataagcacatggacgcgctggaagcccgcaaggatttcaagaagcacctggcttccctgcaggccaagagggagaagaggggaattctgaaaaacaagctgaccaccaaggcggaatatgaggcctccctggccgcctggaaggcgctccctgcggaacagaaggaaaagacgcagccgccgatgcccaattacatccaatccgccgccgtagtcatggacaatgccacgggggctcttctggccgtcgtcggcggccgggacgcggaagaatccaagctgaaccgcgccattcagtccaggcggcagaccggctccctgttcaaacctttcatttacgccacgtttttccagcagggcaattctgcggatacccgcatttcggatgacaggattgcctacggggaaatacgcggagccgccaactggtccccccgcaattcggacggaacgtaccggggcatgaagcaagcctccttcggcctcatcctttcccgcaacaccatgtccgtgcgcatcggcaaccgcgccggtttgtccaatgtcattcaatccgcacaactggcgggcttccacggaaatatttcccgcaccccggccctttatctgggcacgtgggaagcgtcccctctggacattgccagcgcctacagcgtttttgccaacgggggcgtacgccccacgccgtacatcattgaccatattacggattcccagggccagccgcgcttcgccatcaccaagagcaagcgcaccgtctattcccagcgggcggcgaacattacctcttccatcctccagcaggtctgcaagcccggaggcacggcaggcaaaattaccacgctgggctttaaatccccctgcggcggcaaaaccggaaccacgaataattatacgaacgcatggttcgccggatatacgtccaacctcacctgcagtgtctgggtggggtttgattcctccaccaaaattctggaaaaaggctacggaggcaccctggccctgcccgtctgggtggacattatgcttgccgcccagaaggaaggctatcccgccaacgccatccgtacacgtcccggttcggaagggcaggccgtactcgtctgccgggaatccaatcaactggcccattccggctgccagtacgccaagactgcgtattttgaaacctccgcaggctaccaggcccccgccaacatgtgtgaacggcacattcccatggcggaaccggattcggaagagagcattccctatgcggaaccgctggacggcagcgacgataacatccccctggccgaacccgtggaagaaacggacggcatcccctacgccacccccatctgattgcttattttttccttatgatttccccattttttccctggttcctggcctttttgctgctgatcgcctgcgtggcgctgctggttctgctgctgcggtaccgggaccgctccgtccgcctcgaagcggaatcccgctcctggcaggaacgggcggaggacagaacccagatgctccgccgggcggaagaggtgctgaaagattccttcgcaagcatcagcgcggaagttctccggaactcggagaaacagtttctgaacctggcggaaacgcggctgcaaagccagcgccagcaggccaaccatgacctggattcccgcaaacaggccatcgagtccatgctgaagccggtgagcgaatccctgaaactggtccagttccggctgggagagatggaaaaggaacgcgtgggcgcctatacggacctgaaaacgcaaatccgctatatcctttccggcaatgaagccctgaaaaatgaaaccgccaggctttcccaggctctgcaccacaacagcgttcgcggccaatggggagagctccaactgcgccgcgtggtggaactggcaggaatggtggagtactgcgatttcacgactcaggaaacccgttccagggaggaggaacgggtgcggccggacatggtcattcaccttcctggaggccgttccatcatcattgacgcgaaagcgcccatggcatcctacctgaatgccgggcagacggagaatccggaagagcgcagccagtggatggcccgccatgccgcggacgtcaagaggcatttgcagcaattaagcgccaagaattactttgcccagttttccccatgccccgaattcgtcattatgttcctgcccggggaatcctttttccaggcggctctggaagcagatccctccctgattgaattcggcgcggagaataaagtcattctttccaccccatccaccctgattgccctgctgaaagccgtcgcttacggatggaagcaggagcagctggcggataatgccaagaaaatttcggaagcgggagcggacctgtacaatacctgctctatcctttccggtcatttttcctctctgggcaagagcctgaatcaggcggtagcccagtacaacaaaaccgtttcctcttttgaacaccggttcatcccccgggcccagaagttgaaaaatctgggcgtcacctccacgaaggaacttccccgctccctggaagacattaccgaacaggccaaatctgcggatgttccggatactacgtcctgaaagagcggcaacaatacgtctttttcccttcctgcccatttccgagccgggaaaatacagctctaaggcatcccccgcaaacgctttcctgcgcttgaaagcatcttggagatgtagaggaattcagcctccgacggccctgcacttcccggatttttcaacaattcctatgcgcggcaacgggaaacggcaggctgctttcctcatgcagccgggcagataattcccccgcggcggcgcacaccggcacccggaaggcatccagagcggaacgggaactgtagccccaccccaccagaataagccgtgttccggcgttcacggccgtgttgccgtcatgggcggagtcccccaccatgcacacctgcgccggctccctgccccaggaacggacgatggacagcagggagtcaggttccggcttgcgcggaaagcgttcggaaaaacccatcacctcccggaagggaatttcaggcaggatatggcgcaccagcggcaccgtaaccgcatggggcttgttggataaaacgcccagaggatggccttctccggccagggacaacagcatttcccggatgccggggtacggaaccgtgccctcctgccaggtgtgcgggtattcacgcatgaatccccggtgcaccgcttcaaaagcttcctccggcacgtttccgttgaaatagcctttcagggaagccaggcaaagctcccgggcccccttgcccaccatttcccggatggcgtccacggaatgctccggatatcccagcgctttcaaggccaggttcaggccgcgggcgataccgggaatggagtccaccagcgtcccgtccaggtcaaaaacaaaacccgttttcatggattcaatggcagaacccccgttcggaagtttccacgaactggatgattctcctcaggcaggcattttccgcataccccgaatgccgcagttcctccagagcttcatgaacagtcagctttttattgacgaaaagctttttatagcacatgcgcacggctttcaggtcttcttcggaaaagccgcgcctctgcatgccgatggagttaacggaacgcgttacggccgggtggccctccacgatcgtgtacggcaggacatcctggctcacgcgggccattgctcccaccatggcatgttccccgatgctcacaaactggtgtacggcgcaacatcccgccaggatggcgtaatcccccaccgtaacatggccggcggcggtagcgaacccggagaaaatcacatgattgccgatctggcaatcgtgcccggcatggcaggaaaccaggaaaaggttgttattccctatccgcgttgcgccgccaatgtccgtagcccggttgatggtggcgttttcacggaagacgttgttatcccccacttccagataagtcggctctcccttgtatttcaaatcctggcttttcaggccgatgacggaaaacgggaaaaattcgttgccgctgccgaaggaagaaggaccgtctataaccacatggctgtgcagcacgcagccgggtcccagtttgacatgttccccgacaacgcaaaagggaccgattttaacatcatccgcgatctctgcagcaggatgcactactgccgttgggtgtatttctggcatggctgaaacaagtatgaaacaaattcaggtgattaaaagcctaaaccccgcagggccgtctttttatcacatttggccggaagcggccgcataagcctccatctcaggcagccagggaatcagcagaacgtagatgagttgaaggcacagaatgaccagcaccaacgtcatcaccactttgcggaacgtgagggagccgttcagcacatccgtagtccccagcttcctgtcccagggagtaaaaccgaaacggcgcacccaccaccaggaaaaaaacagggccagcagcatcagggaaggagcaaaacaccccagaccaagcaccatgacgaacagggagcgccggaatgccatggggaaagaaaggcgtcttccccggtagtccctgacggaaacgcccagcatggcttttcccggggttgtgcccaatgtcccaagaaatgcagtttccatgagaaccatcgggaggcagaggtaaagcagagcttcataggaaccaggaagaaaaccgggattgaaagcagcaccgaataccctgagcacagccaagtacagcgtcatgtgcatcattacatcagccattctgccaagaaaacggacgtacgcatacggaaccaccagcggcactccctcctccgcgtcctcccctccttcttccggcaggcaatccgcatctgcggaaagcgccgggacatcttctacccctgcgttttccagcctctcttccctcccgttccgccgttccccttcttctctgctgacggcacctgctcctttcaatgccggaaggtcacggatgcatacccactccgggcatccggcatgccacgcccgggcgttttccggaatgaggcccgcctccagcatggaaatgacctccacttccggcagaggccccttccgttcatgatcctgaatccagtaaatatccataggcgattcctgttacatactgcgcagggagcgggccggatcctggcgcgccgtgatcagggcaggaatgatggatgccaccacgaccatgacaaaagctttcaccgcctgccatgccagctccgcccagtcaatcaccaccgggatattcgccgtgccgtggaaggccacagggaacgggtcaaagcctattcccgcaagaaaaccctgaatctgcatgcggtattccagcaccagaagccccagccctacacccaggagagctcccacaaaaccgatgatgacgccctgccacaggaaaacgcgcaccacctggaacggcgtggctcccaaagccttcatcacggcgatttcctttttcctctggatggaaacggtaaacatcaccgccatgatgcaaaaagcggaaatcagggagatgaaggacaggacaaagctcatcatcatgcgctccttctgcatcagttcaaaccacgcgttaaagcggtcatgccaggtttccagcgtccatgcggaagaaggcttttccttttccagcgcctgcatcacgggggccagcatcgtttccacatggtaagggtcttccacgcgcagggccacggcctgcaccacgtcatcctcataacccagcaattcctggccgatgaccagcggaatgaaaagatccgggctgggcgtatgctgggaggcccggtaaattccgatcacctccaggtctttcggcatcaccagctccttgattttccggaagcattccatatccgcctcatttcttgccccggccttgaaaccgctcaaaacggtttcccattccttccgcgttccttgcggaaaggccaccctaccgttgtccgcaatttccccgtcgttcagcacggcaagcagatccatcaggctggaacgttccgcatccctgcgcgggacggacaacaacccgttaagcagggaaaacgccctgtccacggaggctctgcttaccatttcacgctctccctccgtcttcaggttctttccccactccttcaaatccttgagttcccgcgcgtttttttccgccagcatcggcagttccgtctgctggtaggcgtgggaaatttcctgaaaattgcgggtcgtataaacccggacaacatctcccacattcaatcccatgttctccgccacgatggaggaaaccacagccttttcccccatgtccagttccgcatcgccagctaccaccaaacgcttcaaatcctccagctgggcggcgttttccgtatcaatggcccggaaaaagcagggcctctgccgcccctgcacatccaccagcgcatagtcttctatcagggcgtaggtggactggacgccgggaacgtgcctgagtttctcccccaaatccatccagtctggaatcacttccctcacgccgaagtcgttccggtagcatacctggacgtgcggggagtgcgcaaacagattcccctgaatttccttctggaggcctcccatgacggacagcacgacaatgagcaccatcacccccagagatacgcccagcaggcaaatcagggtaataatggaaaagaaagtccgcaacgggttcaaataccgcagcgccagactcaggctgatgtaccggctcaataggttcttcatgaataacgcggcacaccttgcctgatcccgctcccctttccaagcctaaaacatgttccggggaaggagatcgtttacctgcctccggcaccctgccattccaggcacagccagcgggccatggaggcgatcacccggtcacaagcggattcagaatcctttgaatccctgatgaacacggaaaccgccattttccggccgttgggaagaacaatgatgccgacgtcattgcgggcggtaacgccaccccccggcagcgtgaatccggatcccgtcttatgcgccaccacgtaatcccgcggcagctgtcctttcagacgttcaggacctgtagaacatcccgccatgatgttccaaagaacactctgtgtgccttttttcaaaattttaccttcgtcaaacgcccggagaagggagttcatggccgacggacggcttgagttgacatattgcaaatcatgattccggtgtatttcttcttccgtaaaacggacattaatgccgtcaattccccattccttcaaatccttctgcacggcctgcggccctccaataaggccaaacaggaggtcgcaggtattgttgtcgctttcctggacagtcactctcagcagttccttcagagagaaatcgccgccttgcgggaaacgctcccggagggggctccaggtatctttcaccagttgttccggacgtatgcggatgatctgttccagattcatggcgccctggtccacccgcttcaagacggacaaggccagcacgaatttgacgacgctctgcatgggataggccgcctcatcccccaccatgacggtttcccccgtatccagcatttccgcagccatgcccacacgggccttcagggaatgggccagttcgcgcacggcggaggaatccgctgcggaaacggcaggcggagaagacgtggccccctgagaaaaaacgcaaaagaacatgatgcaaccgcatagataaacaccggtggaagtcataggcgccattccataccacgcccgcagcaaccgcaataataatttctcccccttttttcctttcttcgtcatccgcaagccgggcagaaaccttgccacctgtccggcttcctgataataaggaaagcatgccccatctcctttcggaaaccctcgtctggtgcgtcaccctgctgttattcggcatggggctgatcggcacgctcatccccatgcttcccggcattatgatcattgcggccgggtgcgtctggcagggagtcatgggcagagaaaacctggcgtggtgggaatggaccgtcctggcgctgctggtggcgggaggcatggtcattgacaagctttccggaggcatgggcgccaaaaaattcggcagcactgccgccggcatctggggagccatcatcggcgccgtcgcggggagcctccttttctcccccattacgggccttttgttcatgccgttcctgggggcgttgctggcggaacttatctttgccagaaagaatatcatgaacgctttcagagccgggtccggagcggcgcttgggatgcttgccggtctgctgctggaatttacctgcggcctgctcatcatcgcctggttctgttcctgctgcttcctgttttgatgccgcgcccggcggaagtttccggcaggaaaagcagacatttttctgctgctgaaaaaaacacagtttccccaacgtattcagttaaacgccgctctacacgcgcatccgtccgaacggacgggttctcccattccctcattttaccagcttatggatgcacctgttccgatacccgtcgccatgatggcaggtttcatgattcttggagccattctttccatggggaaatgttccttcctcatcgcaggctacaacatgatgaacagagggcagaaaaagcaatatgatgaacaggcgctgtgccggttcatggggaagatcatgtactgcctcgccttcgccatgctgctctggctcgccagcatcattctccaaaactccgtgctcctgtccgcctccctgtactttctggtgggaagcattgcatttgcggtcatttacgccagcgccggaagccggttcaaaaaatagcgttttttacaccagctttcttttacttttatcattcgcaacattatcttttcccatgaacgtccctgcaaccttgaaacattccttcctgctctgccttttcgcggcagccgtccccctccgagccattccggcccccatgcaggtcaccgcctccacccccgcccgggtatggacggaaggatacggcacgggcaacggaaggctgggcatcctctctttcggcgtttttccgaaagaaaccgttgtcctcaatgaaggaagcattttcgcaaagaaaaatttccaaatgagggaaggcgccgcggaagctctggacaaggcgcgcgaactttgcaaggaaggaaaataccgcagtgcagaccagctattccgtaagaatatccttccccccggcaacattgcgggggattaccagcagggggggcgtcttcaggtggaattccaggggcttccttcaccttcctcctatcagcgtacgctggatatgcggcggggcaaggcaaccacccgcgcccaattcggcacgggggaattgaccacagaaatcctggcggccccgtccagcgactgcgccgcctaccacattgcctgcacgatgccgtccggatgccgcgtttccctgaatctggaacacccggatccgtccgcccgaattgttgcgcagccgaatggctgggtgctggaaggacagggaagcaacggaggcacccggtttgaaaacacggtggtcatcctggcgcccggagcctccgttacccgcaaaggctcaacaattattcttgattccgcccgggaagtgctggtgctttcatccatttccacagattacaatatccggaagccggaagctcccctgacgcattccctggcggctaaaaatgcgcgaatcctggcaaaagcgcaaaaggcgggatggaaaaaactggcggcggaaacggaagattatttttcccggctcatgacgcgctgtcaggtggatctgggggattccccggccggggtttccgccatgaccaccgcccaaaggctggagcgggtcaaacagggaaagaaggatccggatcttctggaacagcttttccagttcggccgcttctgcacgattgcccacaccaggccggggcagcttccctgcggtttgcagggattatggaatccggagctgagggcggcgtggatgggctgctatttcctgaacatcaacagccagatgaaccagtggccctcccatgtcaccgggctgggagaattccagagctcctatcttgattttgtccgcagcctgcgcccccacggagaggagtttgcgcgcttcatcaaacgggacggcttctgcttcggccactatacggattgctggaagcgcacctatttttcaggcaacaatccggaatggggggccagcctcatgaacggggcatgggcatgcgcccacctggtggacagttaccgctttaccggagaccgggaagaccttaaaaaatcgctgcccattctggaatccaacgcgcgtttcatcatgtcctggtttgaagacgacggcgagggccgttacctctccggcccgggggtgtctccggagaccggattttacgcgccggacggcacaggccccaacgtgctttcctatgtttccaacggcacgtcccatgaccagcttctgggcagggaggctctccgcaattatatctacgcctgcggagagctgggcgtaaggactcccaccctgcttaaagccgtccaatttctcaggaagattccccagcctgccatcggtcccgacggaagggtgcaggaatggaggcagccttttgaagaaatgcagaagggccaccggcatatcagccacctttacggcctcttccccggcacggaatgggatgttctcaatactccggaatatgcggaggccgtacgcaagtcagccgatttccggcgcaagtatgcggatatgggaaacaacggcatcaggaccggatggagcacggcgtggctcatcaatctttacgccgcccttggagacggaaacgccgcagaggacaggatgtacaccatgctgaagcactacatcaactccaacctttttgacctccatcccccgttccagatagaagggaacttcggcttttcctccggcgtggccgaatgcctgatccagagccggatcatgcaggacgggttccaggttatcctgctggctccggccctggcagacgactggaagaaggggtcagccacaggattgcgcacgcggggagggcttaaagtggacttgtcctggcaagacggccgggtgcaggccacggctaccgctgcgcgtccgggcaaattccggttcatgcatcagggccggaaaaaggatttgtccatgaataagggagaaacggtgcgtcttgattttcctccgctttcccattaggactcccctttctgcgttacctcttcaatttccgctatgcatttcttttccatgactttcaggctcggtctgctcatagtggtggtctgcatcgccctcagctcctgttccaagcttttttctccccgcggaagcggagaaataccggacacggaccaaacggaaacgctcctgaaagcgcatgtattccacctggcggataccatcggtgaacggaacgtctaccaccccggctccatggagcgttccgcccgctacattgaacaaaaactggagggaatgggttatgccgtcacgcgccaggctgttcatatcccgccctccggagaattcggtgccgtaaaggactggacggcatataatctcatcgccatcaagaaaggaacctccccccagcccaaaatgctcatcgtcggcgcgcattacgataccaaagtgggcatggacaactggcacgaccacggtcctgcccggccttcccgcaccggaactccgggagccaatgacaacgcttccggcgtagccgccctgctggaaacggcacgtgcccttgcagcaacttccaccctccacgatgtttgtctggtggcctacgccaatgaagagcctcctttttaccagacgcccgccatgggcagcgcagtacatgccaaatccgtctcccatcattcgggcagggaaaaaatcatcggcatgattgccctggaaacgctgggctgctattccccccgggtgaataaaaaacgccaatccgccgtggttgccggattggccggcctaccggaccgctgcgactatgttgctttcctctccaccaacacgggccgcaaactggcacgctcctgcgcggaggaattttccgccttgagccgctttccggtgcgttccgccgtgttcccgtattacacccgcggcgtttcctggtctgacgactggggatacatgaaggaaggcatcccctcctttgccgccacggatacggccttcctccgctgcgacgattaccatgaaaccagcgatacggctgaaaagctggactatccccagtttgcagaagtggtgcagggcctttccaaactcgtcatttcactcgccaacaaaccatgaataagaaacagatattactctccgcgctttttctgacattcgcctgcgcttcagccggggccgctccgcctgaaccgtccgcgctgggcgccttctgccctccctcagagggaaacgcctttcactccggatggatttcccttgggctcaaagcggaggacctgaaagaaaaacaagcctccgccggacacattacggacgtaggggaagcgcaaatccagcttcactttcccgccggatggagtccgcaggacaggcgcacggccctgtgtatttttccgggaggggggtatgccatccaggccattgaaaaggaagggagccgcattgcaggctgggcggcggaacacggcatggtgggggttgtcgtgaaataccgcgtttcaggaaccagcaatgccctggggaagtttcccggtcccctgctggacgcccgccaggctctgaggaccgtgcggaaaaacgcctcttccctgggaattgaccctctccgcatcggcgtcatgggcttttccgctggcggccatctggcggccatggcctctacgctgtggaaccgcaccctgccggaagaagcggaaaatccgctgaaaaacatttccgcccgtccggatttttccatgttcatttatcccgtcattaccatggagccccatactacccacgggggaacgcgcaacaaaatattgggggcccatccatcccctgccctggaggagatgtgttccgtggagagacaggtgacggagcaggtgccgccggtgttcctcgtccacgctctggatgacggcgtttcctgcgccaacagcaggctgatggaacaggcttgccgggaaaagggggttcccgccagtctgaacctttatcccacgggaggccacgggtatggcatggaaaaacgcggacatcccacggaccaatggcctgaggccgccgaacaatggctcagggaacagggattcctttcttccacggcttctgcccgcgggggtgcgccctccggagtaggcacttcctccggaacacggcgggaatgaatgtgctaggaccagcgtgtgccgcaccgcagggttgaccggaaccgggcccggtggtactttttccgggcatgagtgcgcccgaaaagaattacaaagacaccatcctgttgccggagaccggtttccccatgagaggggatctgacgaaaaacgaacccgtacgcctgaaaaagtgggaagacaccgggctgtacgaacgaattttgtcccgcaggatggcacagggcgcaccccggttcctccttcatgacggcccccccttcgccaacggggacgtgcacatgggtacggccctgaacaaaattctcaaggacctggtcctgaaatcaaaaaccatggccggttatgccgccccctatattccgggctgggactgccacggcctccccatcgaattcaaggtggttcagaaggcccgtgacctggatgcggcggaaatccgccgacgctgtgcggaattcgccaaaggcttcattgacattcagcgcacttccttccgccgcctgggcgtgttcggcgactgggagaatccctacctgaccatgaagccggcgtatgaagccaacatccttcgcgtgttcgccaaactggtggaagacggagcggtgtaccagagccgcaaacccgtccagtggtcctatggggcctatacggcgctggcggaagcggaaatcgactacaaggaaaaggtcagttcctccgttttcgtgcgcttcccgcttctggacaatcccctgggcctgaaagcatccatggtcatctggaccactactccgtggacgctgcccgccaacgtaggtctcgcactccatccgcgtttcacctacgtggcaggcaggttcatgaaaaacggccagacggaaaacctcgtcatcgtcaaggatctgctggatgccttcgctcagaaaacgggctgggttcttgcggaaaccatccgtgaattcaagggagccgaactggaaaactgcgaggcccgccatcccttcctttcccgcacgtcaacaatcatcctggcggactttgtcaccacggacaccggaaccggcatcgttcacatcgcgcccggccatggcgcagacgactataacgtggggcgccaatacgggttgcctgtcctctcccctgtggacgatgacggcaaatacacggaggaagtgggcgtgccctccctggtgggcaaacatgtttttgacgccaacaaggacatcatttccatgctggaacagggcaacaacctcttcggcgtggaagaataccgccaccagtacccgcactgctggcgttccaagacgcctattatcttccgggccgtggaacagttcttcatctccatggacaagctccgcccgcaggccctggaagaaatagacaaggtgcagtggctgcccgcctggggccgcaaccgcatttacggcacagtggaagccaggccggactggtgcatctcccgccagcgcacctggggcgtgccgctgcccgtcttctttgatgaaaacggcaaagccgttctggatgccgccctggttcgcaaaattgcggatatggtggagaaacacggttccaacatctggtttgaactctccgatgaagacctgtgcgaacgcctcggcctgccgaagacctggaagaagggcaaggatacgctggacgtctggattgattccggcagttcccatatggccgtcatggacagccgccccgggctggatgctcctgcggacctgtacctggaagctacggaccagcaccgcggctggttccagagttccctgatgctttccgtcgcctggcgcggcaaggccccgtacaaggccgtgatgacccacggcttcgtcgtggacaaggacaccgggaaaaaaacctccaaatccgacgccaagagcggcaaacccattgacgcggcctattactacgacaaatacggcgcagacatcgtgcgcctgtgggccgcctccgtggactggcaaaatgaagtccccttcggggaagacctcttcaaacaggtgacggaaccctaccgccgcctccgcaataccctgcgcatcctgctgggcaatatcagcggatttgacttcgccgcgcaggcggtcgccccggaacacatgcccatcctggaccgctggattctggaacgcctgaacgccgtcatcagggaaacgctgaaggcctatgaagcttatgacttccgcaaagcgttcagtgccatcaaccagttctgcaccagcgacctgtccgctctgtacgtggacaccaccaaggaccgcctgtactgcgacgcttcctcctccgtgcgccgccgcgccacacaaacggccatgaccattatcttcaaggctctgtgccgcctgctggcacccatcctggccttcacggcggatgaagcctgggaatacgcgggatatgaaggcagcgtgcatgagcaggactttcccgcccccatgccggaatacgatacccaggaggcgtcctccgtcatttcccgtctccaggaaatcaggtccgtcatccaggtagccattgaagaacaagtgaaagccaaggtattttccaaaaataatgaggcctccattaccctgaccgttcccgtgaatgagagcgaagacgtagtggcgctgctggaagaccgggcgtttgccacggaatttttcatcattgcggaccttgacgtgaaaaccggtccggaactggcggcctccgctgcaaaaacggaacatgctatgtgcccgcgctgccgccggtatgaaccggcggcggaaggcggagacgtatgcgaacgctgcgcggaagttctttcctgaaccgcatccactccatttcccgacctttatatggacccccagacggaaaaagaacccgccccccataaaaagacgcctcccggctggctctggtggagcttgctgggcgcagggctgtatgtgctggaccaggccagcaagctgtggattatccgctgcttcccgctgaactacctgaacgaaaagctccataagtacgcctacctgccggactttccgggcttctctcacatcaatgcggacggcacgctggacttcgccacgaacgggcgcatgccggaagcggaactggcgaggctcccggatctgaatccaaacacggtggacgccctgaacaaactgagggaactggaacccatttcctttctggacggaaccatgaacattacccgcgtgcacaacacgggcgttgccttcgggctggggaacggcaccgtctggtccagctatcttttcctggcagttcccgtgctcgccatcgtagtcctagtcgtgctttaccggaaaaacctcttccacacggcatggctcaagctggcctatgtcctgctgctggcgggcgtagcaagcaacctgacggaccgcctgattcaggggttcctgattccgtatgagcaacagcacggtttcttcaccaagctgatgaacggttacgtggtggacttcattgacgtcaccatccccctcttcaactaccgctggcccgccttcaatgtggcggactcctgcatcttcgtagcggcaattattttcttcgtcgccagcattttctccgctaagaataaagaagaaaaaacatcctgaaacgcccatgaccacccggctcgttattctgtcaggactgcttttgtgcgggagcctcgcctccggcaaaaatgaattgtccttcaaggaaacggtggttccggtaaaggtggctccggaccaggacagcatcacggcatccttccccttcaccaacacttccggcaccccggtcaccatcagtaaaatccacgtttcctgcgactgcaccaccgccggagcgaaggataacaagctgacgtatgccccgggggaatccggcgtcatcagcgccgtaatgaaaaccggcaatttttccggcaccgtggacaaggacatgacggtgcacgccaacggctccgcctacaagctggtaatacgcgcgcagatcccggacatcatccggatggaaccccgcaagctggaatgggccagaggagaggccgccgtgcccaaaaccataaaaatcaccatctccaaagaattgcccgtcaacctgaccacggtggatttgacgggagacgcctttgactacgagcctgtaaccgtgaaaaaaggcagggaatataaaatcatcgtcactcccaaatccacggccaggccggccttcaacaccatctgggtgcgcacggattccgccgtgccgcgctacaagcgccaaatggggttcctggccatcaaggaaaactgacatccgcccttctttccatgagagacgccttttccaccgctctgaaactcctgctggccgtatttctgctggccgtaggcgtcgccgcgctggatctgcgcgtcatccagccgttccgcacgccgccctgcaacccggaaactctggaggaagggcacgtgtgcctctcccaggtattaaaggaatggccgggaaaaatcctctggatagatgccagaaagcaggacgactttgaacgccataccgtcacccaggctcccgtttaccccatccgcccggcggatgccaattaccaggaactcctggcaaatgccatggaagccctgatgacggcagaggacaagggattctgcatcgtcatcttttgcagcagggactgtacctccagcgcggccgtggccaatgaactgaaaaagccggaatacggcatccgcgcgcccattttcattctggaaggaggctgggatgaattgcgcaaagaaccctcactagtaccatagccatgcttgacacagcaaccattcgcccgcagttccccattctggaaaccagcgtgcacggcaagcctctcatttacctggataatgcggccactacgcaaaaacctctggccgtgctgaacgccatccgtcactactacgatacggagaacgccaatgtgcaccgcggctcccactacctgagccagctcgcgacggaagcgcatgaagaatcgcgggaaacggtggcgcggttcatcaacgcgccggaaacggcggaagtcctgttcacctccggctgtacgatgggcatcaacctggcggcggataccatcgccgggtccggcatggtcaaaccgggagacgaagtcatcgtaaccgcttccgaacaccattccaatatcgttccctggcaaatgctgtgcgaacgcacgggcgccgtcctgaaagcggttcccctgacgccgggccagaccctggacatggaagcttaccggaacatgctttccccacgcacccgcatcgtagccgtgggacacgtttccaatacgctgggaacggttaatcccgtgagggaaatggccgcgctcgccaaggagaacaggcaggaaaccatcgtgctgattgacggagcccaggctgtttcccacatgaatgtggacgttcaggaactgggctgcgacctgtatgccttttccggccacaagctgtacgcacccaccggcatcggcgcgctgtggggaaaaagggagctgctggaaaaactgccgccgtggatgggcggcggggaaatgatcaaggaagtcacctttgaaaaaaccgtttacaacgacatcccgttcaaatatgaagcgggaacgcccaacattggcggggcagtgggtctggcggccgccatccgctacgtctccgggctgggcctggacaacattgccgcccatgaacagaaactgacggatatggcggtggaaggcctgaaggccatgccgcgcctgaccgtactggccccggacgtgccacacagcgccgtggtctccgtcctggcggagggcgtccaccactatgacctgggtacgctgctggaccagatgggaattgccgtaagaaccgggcaccattgctgccagccgctcatgtgcgccctgggcaccaccgggactacccgcgcctcctttgccttatacaatacggaagaggaagtgcagaccttcctcaaatccatgaaccgggcgctggacatgctctcctgaatccccctcccttccctgcttattgacaccgcgcatcatgaaaacggtttccatccttctcttaggactggccataggcctttccggctgttccctgcaccagcggcaggaaatggagtacgcccattaccaggatgacgccgcggctatccgggaggcccatgccgcatggctcattctttcctctcccagccgcagccgggaatggccggaagcccggaaaaaatacaatgcgtgcattcgggagctggccgcccacctgaaggaagccaaacgcaaaggcggcatggatgaggagaagcgcctgagccttcccttcgtcattgaaaaatccccttatgccaaggacagcaatccgtggttctatgaggccattttcatgtccgatgaagtggaccccaccttccgcctgcgcgaaagcgtgacggtggagggaatgggcataccgctggcggggctggcgccccggggcggttcccgcccccatgccaacgtgcttaaggacaacggcaacgtgcacacgctgacggccattctggactttgaccgcatggtggacgggaaacctaccctccgcaccattccgcgcctgatgaatgagcacatcttcattggcaaaaacaaggtgcggcagcctctggcggccaatttttccgtccccatcgctctcttctggaagctttccgacgcagacgggacggaactgctgggggcattccgccccaaaaaggccatcaatacgatggggctttatttttccgaaccctatgacccccggaaaatacccgtggttttcacccacggcctgatgtccggccccgccaccttcgctaacctgaccaaccgtctcctggtggatccggtcatccgggaaaactaccaattctggttcttcggctatccgtccgggctggcctggaccattccggccagcaggcagcggcaggccctgaaggagctcatgcaggaatacaatccccgcggaacatccagggaaatgaacaacatcgtcatggtggggcactccatgggcggcctcatcacccgcttcaataactccaccaaaccctggacgctgatgaagggactctttgaacttcctccggaaaccttcgcaggcatgacgatgggaaactggaaaaacggactggcgcccctgaactgtgacgaacacacgcttgaacagctccagaacaatttcatcttctccccgtccagcagcgtcacgcgcatcgtgtacatggccaccccgcaccgcggttccactttcgcggacaactggataggaaggctgggacagcacctgatcgacctcccctcggacatgctggaagaagtcacccgcatcgccactctcagccgcggcatgttcctcctcaaccccctgcaactgaaggacgagctgaccagcatccgccagctttccccgaattcatccctggtcaaatacatgtcggagctgcgcggctccccaaatgttcccgttcattccatcattggagacaggggaaggaacgacactcccaattcctccgacggagtggtcaagtaccactcatcccacctggactggagcgccagtgaaaaaatcgttccgtccgggcacagcgtgcaggatgacccggcctccgccgtggaactgcggcgcatcctccgggaacacctggtcaaggtcaaaggccgtaaaacgctcgaagaagcggacgcgaaagccgccactcccatatggcaggccaatccctcgccgcctatcatcctgaaaaggccctgatgcagggggctgattctccttgtccatgcaaggcctccttcccttcccccttctgttgttcctgctgatagcggcagccatcttccagtcaaacggccacgcctcggcggtccagtttccgggttcctgtatgtcccggctttaacggctggagcgccctcgttcatccgccctccctgccgcttccgggaaaaacaggaaccggacaggatttaccttgccgcgggcatctgcggcaacatgccgccgcagttgaaacaactgaaattttccctgctcatcacggcctgttcctggctgccctgatttgactggccggttagggaaaagggcgcgctccatccgggcatgattggcgtccgttcagcatcagagcgtcccgacatcaaaatatgcccgcttatagagttgcttccgtagggggatttaaggtagagtgggaatcaatactattccacctcccttttccatgtctgccgacgattcctttcccatggaccagatttcctctctctttccccaattggaaaatattcagcttgtcggagccaaaggcccccagcaaattttcacagctaccctgaaatccaactttgctcccgtcatgctgcgggtagttcccacggaagaagccggcatcttcggctgggatcctgaattcatcgtccgctccctcaccatcgtggaacaatcccaccaggggctcctgcgcgtttatgaagtaggacaggcggggccgtttactttcatcatctccgaacactccccctatccgcgtctggcggatatgaaaacccttccccaaatatcttcccaggcggcgctcaacctggtgcgcaacatggcggaaggactgctgacgctgcaccggaaaaacatttttcacgggggcatcacgcccaagctgatttgcctgcgcgaagacggcggagacgccctgctgctgcccatcaacatttatcccgcccaacctccggtggacatgggggacttcgcctctccggagtgggtcaccggagcggaaaccacgttcacgccgggcatggatatttacgcactggggttggcgctttacattctgcttacccgcaaaacgccgatggaagcgggctttgccatgccctcctcactaatcaaatgcagcgatgccgtggattcggcagtctcccgcgccatcaatccggatacccgggaacgctaccgggacctgggggatttcatcacggatctggataaagccattgccaatcctgcgggaagaaatgcggcctccatccctccaccgccatcttccccggccattccggccctgaacgtgcaaaaagggcagtccaacatctattactatctcattccggccctgatcgtgggcattgtgctgacctatacctgcatcctgtataagaaggatgtcgttagaatgcgcaatgattataatgaacaggtgcagaaggaaaatagcgcgaaagcggaagcggcaagacaagcgaacagggacgcgcgccgccacgctccggccaccgcgcaaaacgccgctgcggccattccttcacctgttccggccgcgcgtccggcgcaagcgccggcagttcccaaagtttccgcggaacccggcaaagtcaattggagccttcaacccggcgtcaaggttcgccagagttccaaccgcaacatgctgggagcttacggtccggaaaaggccgttgacggcaataccagctccaggatttccgacgtttcaatcagcgccacaggcgtggttgagggaaaaaccgcctggttcggcattgacttcggcagggagaccaaccgcaccatagaaaaggtggtcatttacacgcaagccaacctgacgctgctgggcaccatggaaaaattcaaggtaatcctctacggcaatgacaaaaacgtgctggcggaaaaaaccttcagcaccactccttcggaaaaatccaccaacgtcacttcctggaaactggacgctccggtcaaggcgcgcgccctgcgcgtggaatccgcaaatctctcccagccgctggcattgacggaagtggaagcgtacggaccggaagatacggaagacacaccggttcccgcacctgcggagtaataattatccgcacagccctgcacccgctcgccccccttcgggggccatgctgaaaactaccgtttcctttccccttcccggaaagcaggacgggacagggcctgatggaatgtcacgcgctaagttccgggattggcttcgcgtatgaaattttccggtttctgctccattctccggaagccatccaggcccggacggaggaaaatccgaaaaacgtatttgctccggatgggaaacagccgcccctctccaccttccccaccctggaaaaacgctctcatccccatatggctcccggggaaatatcctgaagcggctgtcgtccctgtggacccctttcccattcaggaaaaataatactccggaaaataaaaaacccggcgccgcctcacggcgggccgggccagcaaaatagcaattcttccgattaccggttggcagacttcacaatcatggcatccttgccgatgcggccgcgcagatagtgaagtttggcgcggcggactttgccgcggttcacgacttcaatcttggcaatgcggggagtatgcagggggaatacgcgttccacgccttcaccataggaaattttgcggacggtgaaagcttcattgatgccggaaccgcgcttggcgatcacaatgccctggaaaatctggatacgttccttgccgccttcaataacacgagtgtgaaccttgatggtatcacctacgttaaatggggtcacatccgccttgagttgctcttgctcgattttgttgataatgttcatcttgtgttatctattgctggtgaatatcagtaaaaggaaaacttacgggacgcagaatatgagccataatcccctaaaaggcaatccaaatttgccatacgtccttaatttattttttcggcggggccggcggcggagccaccctggcaagccattcctccagcgccggaagaaaagcggaggaagacatgaggccccggatgctgtccgcccgctgcagaaaggccttgttgccgccccgggcccgttccgccatcaggatttccagcagcaggcgcgcgcgggtgcgggcgtcagccgcgccgtccagggcggaggaaaggagctctccggcgcggaccggttccttccggtacaggcattccagcgccagagcttcataaaggcaggaaaaaggggccttccgggcggactccatcaaacgcgcggaacggtccttccagcggtctccgaactgcacggaggaagcccaccacccctggaaataacggtcttcttccgtcggcttcacgtccatatccttcatacgggcgtatggacggtacagggggtctccgaacaccaccccctgccaggacagcacaggcatgctcatccaggaagcctccgccacggtatagccgtccaggaggcggtccacaaaaatatcaaagcggtggcaggcgcccaggaacggctcatacacgtttcccaccgtcacagcagcccccttctccagcagggcggaactccaccccctgccggggaccttgaaatcggcggcgctgaaggaatgcagatgcatggctatcgccccgggccggaagcggaacgaaggatccgaaaacggtccgttcgcattccccgcataccacccgcagtaaagagccgtatcccggctcaaggggaatttttccggcagagtctggggccagtcatccagataagcgggaatgcccgcctccctcacgcgctcgaacacgtcgtccagccaccggtccccctgggcatagggaccgccccggtccacaacggcccacccccataaaccttttttctccacgttcgccggttccgtcaccagccgcatgcaggtatcgggcgtcagtccgtccaggcggcataccagaaacgaaggaaggccggaacccacaaaatcctcccttttattaaaatagggattcacctgccaggacttccgttcataaccgcccaccgccagcagagccaattcggaatccaccgcagcgcgatccgtctgcatctggttgacgcctttcccgggaaggagagcgggcgtttcatgccgtatcttcatcggcagatccgccatcagcaccagcacaaaaatcttccggttcatcaagggggaggacgcaatgccggaaggaacccaccaccgttgtttccgcgccgtctccagcagcgggacgcggatcgtatcctcatactccttccgcgaaatctcgctggtcatggggcaatccagggaaacgagattcccttccggaacgccgcgcacccgcgcatactccctggccatgcggcggctcagctcggattttccgttataaaccacggccacatgagcgggcagcagctcataggcacacgcggcggaaaaccacgacgccagcagaaataacacggctaatccactcttgaacatgcccctaccatacctcatcttccggggcaatcaagcaggtgaaaggagcggccacgaattcgccatttttccgcttttcgcttcacatcctaaaaaaatacgctttaataactcttgatgtattgcaggcctcccccctgcattccctataaccatcacacgcatatgattcagcaaattgaccatatcggcatcgccgtcaagagtcttgacgccaccgtcccctattaccgcgatgcgctcgggctcggagagccccacattgaggaagttcccactcaaaaggtccgcgtcgccatgtttgacgttgccggagtccacatcgaactgctcgaacccacctctccggaaagcgctatcgccaaggctattgagaaaaaaggggaaggcatccaccacatcgctttcaagaccaatgacatcgccggaaatatctcccaggccaaggaagcaggccttaccgtgctgaacgacccgcccgtccccggcgctcacaacacgcaggtcaccttcctgcatcccaaatgcaccttcggcgtcctgaccgaattctgccagcaccccggcggctgcgaatgcggcaagtaacattctccctattcaccataccactagaccaatggctattgatcccaaattgattgacgatctgaacagccgtcgcaagaaggtcatcctcagcggcggtcaggaaaagatcgacaagagacatgaaaagggcgaaatgacagcccgcgaccgcatggggtacctctttgaggaaggcaccttctcggaaatcggcatgcatgtgcgccacaactgccacaacttcggcatgggtaagaaggaaatccccggcgacggcgtcgtttccggtttcggcctggtggacggccgcccggtagcctgcgcggcctccgatttcctggcccagggcggttctctcggctacatgcacgccatgaaaattgcggatgctcagaagtatgctctgaaagccagcatcccgatggtgaccgtgaacgactccggcggcgcgcgcctccaggaaggagtggcggccctttccggatacgcccaggtgttttacaacaacgtgcttgcctccggcgtggttccgcaaatctccatgatcctgggcccctgcgcgggcggcgcggcctactcccccgccctgacggacttcatcatcatgcgcaattccggcaacgcgggcatgtacatcaccggtcccaaagtgattgaacaggtcacgtatgaaaaatgcacgatggacgacatcggctccgccgccattcacgccaccgtgtccggcaatgtccatttcgtagcggacagcgacgcgcacgccatggacatcctgaagaggcttctttccttccttccttccaacaacacggaagaaccgccccataaactggacactccgctggacctgagcgctgacgaaggcatgagcgacctgattcccggcgataaccgcacgccgctggacgtccagcccatcatcagccgtctggtggacaacggggacttcctggaagtacacaaggacttcgccaaaaatgtcgtcgtcggattcggccgcatctgcggcgtggtggtcggcatcatcgccaaccagcccaatgtgaaagccggctgcctggatatcgattcctccgacaaggccgcgcgcttcatccgtttctgcaacgcgttcaatattccgttggtgaacctggtggacgtacccggcttcctgcccggcaagaaccaggaacggggcggcattatccgccacggcgccaaacttatcttcgcctattcccaggccacggtgcccaaagtcaccctgatcatgcggaaagcctacggcggcgcctacatcgccatgtgctgcaaggacctgggtgctgacgccgtcttcgcctggcctggtgcggaaattgccgttatgggcgcggaaggcgccgtcccggtactctacggccgcgaactgaaggctgtggaagacccggcggaaaaagccaagcgccagggcgaacttctggaagaataccgggaagccttttacaacccgtatgtggcggccggcatgggacagattacggaagtcatcaatccggaagaaacccgcgccaaaatcgccttcgcactgcgcaccctgctgaacaagaaggaagtgcgcccggccaagaaacacggcaacattccgctctaacatccatcccaacggattcatatgttacttacaacactcgcttttgccttcgcacagggcatcgccaacgttatggacaatctgaattatcaggttgtcggcatcatggtggttatgctgtgcctgggaggcatggccgtcattctgaccgtcagcggctccatcgccgccgccattcagaacagggccaaagccaaaacagccgctcccgtagccgtgcctgccgccgctcccgctgcggcgggcaaaccgggcatgactccggaaatgctcgccatcctttccgccgccgtggattccgccatgacggagcttacgccggaaatggtggccgtcatctccgccgccgtggacgcaggcctggacggcatgagccaccgcatcgtggaaatcaagcaatccccgggttccggctatgcggccgcgggcagggcggaaattttcgcctcccaccgcatccggccttcccgctgaactactgcattattcacccttaccccgcccaggcggaaccatttaacttaatatcccataccacacactattatgaagaaacttcgcatcaccgtagacggcaaagtatttgacgtatccgtagaacttctggaccaggtgtcctccaccactgcggcgccggcccccgcacctgtggccgctcccgctcctgcggcttccgcccccgtggccgctccggccccggctcccgcacctgctccggctccggccgccgccggcgcaggagacgttcccagcccgcttgccgggaaggtcgtctctctggacgtggcagcaggcgctcccgtgaaggccggtgaccagattctgacgctggaagccatgaagatgaacaccatcatctacgctcccgcctccggcacgctcaccgctttctgcgtgaacccgggcgacacggttcaggaaggacaggcactggccaaaattggttaatcccggcggcggcagcccggaaacgccaacagtcccgggctccggctcagataataaaccgctacaaaaatattccctatgagtctttttgattcattaatcacctttttacaggggatgggcgtcttctccctatcatggcagatggtagggatgtggggcattgccattctcctcctgtatctgggtgtagccaagcaatacgaaccgctcctgatggttcccattgctttcggcgccctcattgccaacattccggataacggaatgctcatcacccagctgaaccagcaggtcatctcctccaatgaacagggggaagtaaccgccacgtctctgaacaacgtggggtacctgcgcgttcacgtggctccgcttcagcaggctccctccaaggtgccagccaacctgaccacgcctgaatcccgttcccagtatcaggaaatcatgcagcagcccatgcaggtttaccctggcagccagctgactgtttccaagatcaagtccgtgcgggaatcccaggaaaaagcaaaagctgacgcggcccgtctgggcgacgacagcctgacggtggaccccaacctgaaggatttccagaacgtgacggaagacaacggcaatgaaccggtcttcctgctcacgaacggagaagggaccaccgtcgtccgccagcagggcgtcaattactttgacaccagcggcaaccggattccggtggatctgaaaacccagaagctggagcccctggtggtttccgccgcaggcaaatacgtggccgtaggccagcatacccaggaactgctggtcacctccatccacgggggcctgtatgactggatcgggctgggcatcaaggctgaaattttcccgcccatcatctttctgggcgtaggagccctgacggacttcggcccgctgcttgccgctccgcgcaccctgcttctgggcgcagcggcccaggtgggcgtagccgccacgttcttcatggccctgttcatggggttcaccccgaatgaatccgcgtccatcggcatcattggcggcgctgacggccccacctccatcttcctgacgatgaagctggctccgcacctgctgggcgccgtggccgtggccgcatacacgtacatgtccctggttccgctgatacagccgcccatcatggcgttgctgacgaccaagaaggaacgcctcatccgcatgaaatccctgcgaacggtcagcaagagcgaaaaactgttcttcgccgtgctggtaaccattgtcaccattttgctgattccggacgcatccccgctgatcggcatgctgatgcttggcaacttcctgcgcgaatgcaaggtgacggaacgcctggttcaggcctcccagaatgaaatcatcaacatcgtcaccatcttcctgggaacctccgtggggctcacgatgcagggcgaccgcttcctgcagtcggaaacgctgctgatcattcttctgggtatcgtcgccttcggcgtggcaacagcgggcggagtgattgccgccaagattatgaacctcatctggcgcaagaatccggtcaaccccctgatcgggtccgcaggcgtctccgccgtcccgatggcagcccgcgtctcccacaatgtgggccagaagtacgacccctccaactacctgctcatgcacgccatgggtccgaacgttgcaggcgtgatcggcaccgcagtcatcgcgggttactacatcgccactctggcgaaataaccagaattgaaaattactcccggcctcggcccgtcccatgaattccgcagcctcattttccacccctccggaggaggaaggaccatgcggcgactggacttatcatgaatgggccgaggctttttccaccaatgatctggcccgagccctccccccgaggcatattgccgtctgccgcgttcagacaggaggccgcggcaggttcaaccgcaaatggataggggaggaaggcggcctgtgggcatccttcaccgtccccctgtccgctcctgaggatacagcggccggcgtgcactggggccatttgcccctggttgcggggctggccctgttcaacatgctccgcggcatggggctggattccgtgcgcctgcgctggccgaacgacctgctggcgggcaaatccaaactggcgggaatactggtggaacgcccagcggagaacatggccgtcatcggcatcggcatcaatgttttcaatgatgtatcctccatcgccggggaaatcaaggaccctccggcaaggctggcggatcttgttcggggctgcccttccctgcacgccgtcatggcttccctgggcagtcatttgaaccaggttctttccgtcttttcccacggcggcgtcccctcccttcaggaggggctgtcccgggcatgggccggagaaaggccggtttccattcttacggatgacgaaaccatccggggcatttttacagggattgacgatcagggcaatcctgtgctatcccttccggctagcaccgtccgcaccattccggcgcacctgatcaacaggctcctcgaagaatgagcctgccgctccgtttttacacggggtttctttcttttttcatccaacaaaaatcactgacatgagttacaaggtactgacaccagaagaagcagcaagcctgatcaagcatggccaccatattggcctgagcggattcacgcccgccggaacggccaaggccgttacggctgcgctggcaaaaatcgcagaagcggaacatgagaaggggaaccctttccaggtgagcgtcttcaccggtgcttccaccggcgattcctgcgacgggatcctttcccgggccaaggcaatccgctaccgcgctccctacaccaccaacgttgatttccgcaaggcggtgaacaacggggaaatcgcctataatgacatccatttgtcccagatggcccaggaagtgcgctacgggttcatgggcaacgtggacatcgccattattgaagcctgtgaagtcacggccgacggaaaaatttacctgacggccgcaggcgggatcgctcccaccatctgccgcctggcagacaaaattatcgtggaattaaacgccgcccacagcaagagcgccatgggcctgcacgacgtttacgaacccctagatcctccctaccgccgcgaaatctccatcttcaaacccagcgaccgcatcggcaagccgtacatccaggttgacccgaaaaagattgtgggcgttgtggaaaccaactggccggatgaagcccgttccttcgccgcagcggatcccctgaccgataaaatcgggcagaacgtggccgatttcctggctgccgacatgaaacggggcatcattccctccacgttcctgcctctccagtccggcgtaggcaacatcgcaaacgcggtgctgggcgccctgggccgcgacaagacaattcccgcgttcgagatgtacacggaagtcatccagaattccgtcatcggcctgattcgggagggccgcgtaaaattcggcagcgcctgctccctgaccgtgacgaacgactgcctggaaggcatttacagggatatggactttttccgcgacaaactggtgctccgtccctcggaaatatccaacagcccggaagttatccgccgtctcggcgtcatctccatcaacaccgccattgaagccgacatttacgggaacgtcaactccacgcacattggcggcacgaagatgatgaacggcatcggcgggtccggcgacttcacgcgcaacgcctacatctccattttcacctgcccgtccgttgccaaggacggcaagatcagcgccatcgtccccatggtttcccaccatgaccatacggaacatgacgtcaatatcattattaccgagcagggggtcgcggacctgcgcggcaagagcccgaaagaacgggcccagaccattattgaaaactgcgtccacccggattacaaaaacatcctctgggattacctgaagctgtccgacggcaaagcccagacaccgcaatccatcagggccgctttgggcatgcacgccgaactggccagaagcggagacatgaagaatgtcgactgggcccagtataagtaattccgcatgccgtcattcgcattggcatccatgaattcacgttaacccctcaggaccgcttccgcaaagggagcggtccttttcctttttcccatcccctctactccttctcttcaccatgaactggatgatttacccggcagccagggctttcatcaaagtctgctccgttcttttcggcacgggcgcagcagcggcagtcctcatccatctgttcatgccttttttcctccgctctccccgaacagccgcgcccttcctgcttttgggaacaggggcggaactgctctccatcctttccctgtccttcctcatgttctggggcgtcagagttctgctggcctcccgcggaagcagaataacaagaaatctgagcatgctggccttcctgcccgccctgtacgccctcctcattccgtttgcgggcatgcccgtcccatcgcaatatacggaaatggacagggtttgggaggccgtcctccttctgtcggccgtcacttctttcttttccttcccttatacggcgggatacgatgccgcaggcaggagattattcctggcctggggcatcgcagcggcaggctgcggtttgcagagcgccctgttttttcttgccgtcctgttgcgtcagttcctgtccaccgcagttccctccctggcagcgcctgttgcatggctggccgttcttctgtcctgcggcctggaaatcatgctggcgaccctttccgctattctggcgcagcgcctgtttaaagaggtcatgtccatagcatccatgccggaaccgattgatccttccatgccgggcaaccgtccctgactttcctcccctccgtttttaccggcctgccggaagagcaccctcattccccggcatgaaaggcttttacggctttgcgcaaaaagccgtccggaaatttccgccggtggaacggaatccgtatggaaagcaacccgccccaccccggaaagccgcgggttcgcagggccccccctcccgtttccacgccgacggcagacagccctatttcaccaattcatccagataacggccataaccgttattattcatggctccggcctgggagcgcagcgtttcctgggaaatccagccgttattaaaggctatctcctccaggcaggctaccttgaacccctggtgatgctccagagtacgaacgaacatggaagcctccagaagggtatcgtgcgtgcccgtatccagccacgtataaccgcgcgccagtttttccacgcgcaacaggccctgcttcaggtattcctgattcacagaggtgatttccaactcgccgcgggaagacttgggaatccgtttggctatctccaccacccggttgtcgtaaaaatagaggcccgtcaccgcaatatccgatttgggcctgagcggtttttcctcaatggaaaccgccttcccctcctcattgaattccactaccccgaaacgctgcgggtcatgcacctggtaaccgaaaatggtcgctccgctcgtcagttcggcggccctcctcagcttctccgtcaggccgcgcccgtaaaaaatattgtcccccagcaccagggcaacggaatcctttcctatgaactcctctccaataataaaggcctgagccagcccctccggcctgggttgttccctgtattcaaaggaaacgccgaacctgctgccgtcccccagcaaatcccggtacaggggcagatcccggggcgtggaaataacaaggatttcccgtatcccggccagcatcagcacggagatgggataataaaccatcggcttatcgtaaacgggcagcaattgcttgctgacggaaagcgtaacgggatgcagacgcgtgccgcttcccccggccagaacaatacccttcatatcaaattcctagccattggttccaagacgttccaggcggtattccccggacaggatgccccgccaccattcctcatggtccagataccactgaatggtctttctgaatccggaagaatggtcctggcgcggagtccaccccaattccctccgtattttggaagcgtcaatcgcatagcgcaggtcatggcccggcctgtcctgcacaaaggagatttgctcccggtagctccggccgtccggacggggccgcagttcatccagatgggaacacagcagctccaccagctccagattggttttctcgttattgccgccgatgttgtacgtttcccccggttttccgcaggaaacgaccgtcaacagcgcctcgcagtgatcccccacatacagccagtcccgcacgttttcccctttgccgtatacaggaatgggttccccgcccagcgctttcaggataacgacgggtatcagcttttccgggaactggtaggggccgtaattgttggaacagttggtgatcagcacgggcagcccgtacgtatcgtgccaggcgcgcaccaggtggtcgctggaggccttgctggcggaatacggggaatgggggcgatacggcgtggactccgtgaacaggccttcctttcccagggagccgtacacttcatccgtggaaatgtgatgaaagcggaaacgctcctttttctctccctccagggaacggtaatattccagggcggcctgaagcatggaaaaagtgcccatgacgttggtggtcataaaatttcccggatcgtcaatggaacggtccacatgggattccgccgccaggtgcatcacccagtccggagcgtactcccgcaaagtgcgccgcatcagggaagcgtcccggacgtcggcgtgcagaaagcggtatgccggagaatccgccgagccgtccagtgaatggatgttgccggcataggtcagggcgtcaatattcaagacttcatggccgcgctccagcagcagcctgaccagattggagccgatgaatccggcgccgcccgtaacgataactttcatagcactgttttcagggaaagatgcggcgccatcatacagcagcggcgttttttttcaaaacaaatccgcccatgccgcgggaacgtggcggcatgggcgggaaaaagcaggttccgtaaccgctgagacggctagcagctcagctcccggcaaaggttgatgatatcctggttcacggagtactgctgcccggcaacggaatccagggaggcatagccgtactggccgtcatgatacaccatgatctggttgatgtccccgttgttcagagcttccacggcgcgggtggcaaaacgggtgcccatcaggcggtcacgggcggtgggggaaccgccgcgctgcacatggcccagcacggtcaggcgggtatccatgccggcgcgttccgtcagccagcgggtcaggtactgcgccacgcgggtgccttccgccaccacggcaatgatgcagcttccttcctcattgatgacaggctggaggcgcttgtaaatggattccagatcatacggaatttcagggacaatgcagatatccgccgcgctgcaaagagcggtggtcatcgccagatagccgcagtcccgacccatcgtttcaatcacgaaagcgcggtgatgggaacgggccgtatcacgaacggaatcaatgcaatccagaatcacgttctgggccgtatccacgcccaggcagtagtccgttccggcaatgtcgttgtcaatcgtagccggaataccggcaaaaggcacttcaaaatcattgaaaaagtcgttcagggcgcggaaggaaccgtccccgcccatgatgatgagcttgtcgatgttgcgttccttcagatgttcgtaggcctgcttgcggaattcgtagtcgaaaaagcgcttggatcgtgaggaacggaggagagttccgcccctgtagatcatatcgttggtcagttcccgggtggcttccttgatttttccatcaatcagcccttccaagccgtcataaacaacgtacgggttcatcccaagctggcgggcatgatccactgccgccttgatcgccgggttcattccggcggcatcaccgccagatgtcataatggctattccactcataagtaataaggttaacttgtccggggggaaatgttaccgggcggaacaaataatgcaagcgcggagtttttactggcgcaataaacggcaacgcttcatgatgcggaggcatgaacgacactgcagcagccattctgaaagccacggccgccctccgggacggcacggagaagctccggttcgaatccccggtctatgttacctacaaccctctcacctatgcatgggggccgcatgaacagtatgtgcgcacctacggaaacggggaaaagggccatctgttcctgggcatgaatcccggccccttcggcatggcccagacaggcgtccccttcggggaagtggacgccgtcgtcaactggctgcacatccgcggagaagtcgggcggccagaacatacccaccccaaacgtcccgtggagggcttcggctgccccaggtcggaagtcagcggccgccgcctctggggacttttcgcggaagctttcggcactgcggaaaacttcttccgtcacaattacgtggccaattactgtccgctgatctggatgggagccaccggagccaacattacgccggacaaactgctggcggaacagcgcgccgccgtggacgcagtatgcatggaacacctgctttccctcatcaccatcctgaatccccacacgctggtgggggtgggcgcttacgccacgcagaagctgcgggacgccgcctcccggctccccggcaaaagcttcaccatcggcacgttgctccacccaagccccgccagccccatcgccaacaagctctggccggaacgccccatccagcagcttaaggaactgggcattttataaaaagagcggaggaagtagagcgggaagctccgtgacatggaaggaatcaccagagcgacaggccggaaatcggcagttcatcttgttcccctccaaatctacatcgttttgaaggaatatccggccccctttactggcttgatttgcccagggacacggccttcctgacggaagaaaagcacgccagcatctaccgggacggagaagaacttaaacgcctccccacttccaccacaaaaatcagcctccctccaaatcaatcatcattcttagcctgaaaaccctccgctctcccccgcaggcctttttactggacagggggaaaagggttccgtacagtttccgcgatcttcaagcgttccgaatttatggcaatttcagattacatcgtgaccattggcctggaagtccactgccagatcaagacaaagagcaaaatgttctgctcctgcgagaccggctttggctttgaacccaatacgcgcgtgtgccccacctgcctggggctgccgggtgccctgcccgtcctgaatgagttcgccattgaacgcacgctgctgaccggcctgatgctgggatgttccagcccggagatttcccaatgggaccgcaagaattatttctatccggacatggctaaaaattaccagacctcccagctggatcttccgctgtgcctgggaggggaagtgcccctgtacccctggtcctatccgaatgacgtgatcaaagctggcgtcccccctttccgcaccgtgaagctgacccgcatccatctggaagaagacgcggcgaagattacccatcatgccaattattccctgatcgactacaaccgcgcggggtccgccctgatggaaatcgtttccgagccggacatcgacaccccggaagaagcctacgcctacctcaagtctctccagcagattctgaattacggggatatctccgacgcggacatggaaaagggccagatgcggtgcgatgtgaatatttccctgcgtccccacgggcagaaggaattgggcgccaaggtggaaatgaagaacatcaactccatgtccgccgtccgcagagcccttcattatgaaatccagcgccaggcggaagaactggacatgggcattcctcaaatccagtccacccgccgctgggacgacgaacgcggagaaagcgtcgtcatgcgaaccaaggaagacgcgcacgattaccgttatttcccctgtccggatctggttcccgtacgcacggccccgctggtggagaaagtgcgcgggcagattcccgaactgcctcaggaacggcagaaacgcttcatggaagaatacggcctgagcgagtacgacgccaacgtgctggtgggagacctggaactggcacgcttttttgaagaggcggcgcggggaaccgccagcggcaaaaaaatcgccaactgggtgattaacaacatttccgccgtgctgaatgaaaaaggcatgcgcccgtctgaatgcccggtgaaacccggcgccatccgggagctgatcgccattattgacgacggcaccgtttccaacaaccaagccaaggacgtattcgccaaaatgtgggatgagccgttcctcgccgcagcgcaggccgccaagctgctgggcttcgaaaaggcggattcctcttttctggacggcatcgtgcgggaagtcatttccgccaatccggacaaggtggcggaaatacaggggggcaatgaaaagctcctgaactggcttaccggccaggtcatgaaggccgccaaaggcaaagccaacccgaaaatcgtgacggaagcgctgaaaaaagccctttccatggagtgaccataaacaaagagccgcttcccttgccggtgccggctccttgcccgcagggcatcacggtttgaacagcttcctgtttccggccagggtgttccatacctgcttcacttccccggccagcgtctgcttcatcatggcaagggaaaagtccgccgcctggcccatactgatgtagggaggcagggcaagggcgtccctatccacatgcgcgtccagcagagcggcgcccggataattcaggaacatgtccaccatctggtccacctggctggatttgtccaataaaaaccccttgatgccgacggcatccgccacggcggcaaaagaggggttgttcaggttgatctgccacggaatcagcccggccgcctgcatttccaattggatgaaatccagacagtcattgttatacaccacgattttcaccggcagcctgtactggacaatcgtgatgagatcccccagcagcatggacagtccgccatctccgcacagggcaattacctgccgttcggggtattccatctgcgccccaatagccatcggcatggcattggccatggagccatgattgaaggaagccagcgtcctcctgcccggcgtagcgcacaggaacctggcgctccagatgcagggggtgccggtatctaccgtaaatacggcgtcggatgccgcatgcctgttcagggcggtcgtgagctgttccggccggatgggagactccttgtcatttccttccatataggcgttcatctccttcacgtccctggcgtggcgtttcagggcggcgtccaaatgcccggaatccgtcttttcctgcaccatgttcagcagagcctccgccgtgacggaaacatccccgcaaatacccaggtccaggcggcagcggcggcccagcacttcaccgcgcctgtcaatctgcacgatttcaggtttggtgggaatgaaattgaaataggggaaatccgtcccccacaacacgagcatgtcgctttcatgcatggccttgtaggcatctccccatcccagcagccccgtcatgccgatgcccaggggattgtcatgttcaaaataatcctttcccctccatgtgtaggcaatcggagctttcaagcggtgcgcgagccggacgaccctgtcttccgctcccgcgcagctagcgccgcagaagaaagtaatgcggcggtggtcgtcaagcatccgtgccagaagggatacggattcatgctcaggaacaacattctcccgcgtgtaggaaggaggatgcaccagattcttcatctccacaggggcgtccgcaatgtctccgggcaagacgacgacacctacgtcgcgcctggcccacgcgtgctgaatggcggacatcaaaatggacggggcctgggaagcttccgaaaccagttccgcatatgcactgcattccttgaaaagctgttccggatgcgtggcctggaaatattccatgcctacctggctctgcgggatgtgggaggcaatggccagcaccggggcatggttccggtgggcgtcaaacaggccgttgatcaaatggaggttcccggggccgctgctgccgcagcatacagccagattcccgctcagctgggcttccgcgctcgcggcaaaagccgccacttcctcatgccgcacatgaatccattcaatggtcttcctcctcctcaaagcgtccgtaacggggttcaggctatcccccacaatgccgtaaatccgcttaactcccgccttctccaaaatttcaacaatctgatcggctaccctgtacatgcagattagacaccagccaacctccaacggatttattcttatgtgtcatcccctccatcttttccgcaccggaaaaaatgcctgaggatttcccctgatatcataaggccgccgccttttcaggcagcggcctatgaatttaccagttctctggtggaaaaccgtcaggaacggcggcgtcgcatcatcagaacggccaggcccaggattcccagagaagccgaggccggttccggaacctgaaggccggcaaaaccggcaatctgttccgcggaaagttttgtatccgtccactgaatttcaccccatgtaagattgggattaatccagctttggatatcagagcgatttccgttcatgttgccgttgtaggacaacgtgtcaagcaaggaaccattcacatagacatccatagactggctttggtctgcgccagtaacggccaaagtcacgttaagaagacctccccccaaaacaacggaagcttcagaaacgtctccacggttttgggaaaaagagccggtagaagtattcaagttcccatctcccatgcccagcttggcatctgacgtcagatacaaggcatttgccccgtaactttggcccgcattggtgccataatacccaaacagcgtggtctgggttccttccgttaaggaagaagtatccagccagagggagatcgtgtaattggaagcataaaaattaccgccgtaaggaatgaaactgccaggaagggcactttgtgagagacttccaaacgtcatgtcttttcccaatgcaataccttcagttgtcgtcgccgtaccggcagcgtaagacgttccggccgacggttctaaagagccgggagacgccaacgccggaacggaacaacacgccgcaatggccattaatgctaatgtttttttcattttctgtgaatgatggactgagtagcaattagagagatattccccgccctctgtatatcggattcccaatccgctctttttctcccccccacaggaaagatgagaacaagctttttcaatctgccaaaaaatgtaatataattaccttctattacttatgaatataaaaaataaaacgcagaatagatttttttgtggcggctctgaagttgctgtttaggaacagcaatcccttttcgcaaaatagaaaaaattgtaataatagtttcacatctgaaatgttaggttgacctcggattgggaatccggttgttttccctcagccatcaaaaaaagcaacataaggttttcatattcaataaaaatcaattttcttccccttcatttccaggacctttttcttgaaaaagagccttccccaaattatcctcccgctagctgtaatattatttcatcatgaaatttttcaagacaaccattgccttggcaaccctgctgggctgcctgcccacatcccccgcagaagtcgcctttccggggcctgcacccggaacagccagcgcggaacaatccgcttccggctatactctttccaataatatcctgacggccaaattcatccttcggaacggaagtctttccttcggaggaatgacttccaaactgggccccgtcgccaaggcaggggatgaattattcatcatcaatcttcaggacggacggagcattaaatcctccgagctgaaagcgggaaacgtcaaattcgtctcccttcagcccaaccccaaggccttcaggctggctgaccgcttcccgggaaaagccgtcagcgcaacattccaggctctgaacggagcccttcgcatctcctggcgcgccgtgctcagggaccattcccactacctgcggcaggaactccgcctggcaagtacgaagcccgtccagatgaaaaacatcgtagcgatgcaatatgacctggcagaagggaaagccggggcaccctccgtttccggaaacgccagaggagcactcatcatcaatgacctggcgttcaccgccctggaaactcccatgggcatcaataccgtgggaggcgccggaaatatggaagggggagaaaccgccatctggaatgcggacaagtggtccacagcttcatggaccggaaatttcaatgttccccaggaactgaaaaagcagtacggagaacaggtttccagtgcggaaggcccggtttccattgacggcaaaggagcatgtaccatcactttccagtataagggaggggacaagggcaacaataagctgaaccttgccggcgtgcagctcctctcttccaagggggccgttcttgactccgatttccacaacggcagcaccggagattccaatgccagcaacacttacacggtacaggttccctccaggggaaattacattctgcgctactgggcccagaccaagagcgaaccgattgccagcaagggggaaatcaccttttccctgcccgtgcgcacgctggaggaaaagcaggaaccccaggcggacgaatcccggctggcccagggactctggagccgtaaaaccaccttgcagcccggggaaatatgggacgtatcctccgttctcggaatttttgcccccggccagaaacgccgctccttcctggcttatatggaacgggaacgcgtgatgccctaccgccccttcatccattataattcctggtatgaactgaacatcaaccgcaacaatgattcggaccccgccaagcgcatgacggaagaacaatgcctggccgtcctgaaagactggcaggaacagtttttccagaagcgcggcatgtccatagacgccttcgtctgggacgacggctgggatgaattcaacagcctgtgggatttccacaaaatgttcccgcagggcttcaagcgcattgacgccgccgccggcaggcaaaaggctaagatcggcacgtggctgggtccggtggggggctacggagcctccaagggcaagcgtctcgcttactggaacgtgaagcatccggacaacaagatcggcaatttccagctctccaacaaggaatattttgacgcctttgtgggccgctgctcccagatggtgaaggactacaatatgaagtacttcaaattcgacggcatcagcacccacttccatgccaaggggcccggcaacgaggaggatgcggaaggcatcatccgcgtgctgaacgccctgcgcaagaaaaagggggatctttacatcaactgcactgtaggaacctgggcatcccccttctggttccgttatgcggattccgtatggaggcaggagaatgacttcggcaccatcggagcgggcgacaaccgcgacaaatggatcacctaccgcgaccgcctggtgcatgaagtttttgtgcagggctccccgctgatgcccatcaattccatgatgactcacggcctgatggtcactaaattcggtcctccggcctgcatgccccgcgatccggaaaacgtcaagaaagaactccgctgcgccacggcttgcggcacttccctccaggagctctacgtggatcgggacctgatgagcgccaacggcggagttctgtgggacgaactggccaaggggatcaagtggatacgccgcaatgcggacgttttggacgacgtgcactgggtgggcggcaatccgtggaataaggaaactaacgaaggggccgtgtacggctgggccgcatggaataaaaacaaggccaccctggctctccgcaattcctccgaccaggaaaagagcctgaccggaaccctgcgcagcattctggatatccctgcgaacgtcaagggctccatcaccttcaaggattcctatgacgaccagcggacgctggacggcttctccggcaattccgtagacattgacaaggaaatttccttcacgctgaagccctttgaggtgctggtgtacgaagggggaaaggtcaaataaatcagccggcccacacgcccggccaaagccggaacggcgttggaaaaaacatattgggggaggcgggattcccgcctcccttccttgttcccgtgcgggcagaatccgggtcagaatgttttttcaaacgtcaccgcttccagcggatcggcagggttgaccggcatcaccaggcattccgcaccttccccgcccaggtacaacatcaggctcctgccgggggaataggcgatggagacaccgtaatatcccccttttttcaccagggaccaggttccgcggcaggaagaaacgagatcttcctccagcacggaaaggtcctccctctcttccggacgggcaatccacctgccccatgcctccggacggggaaaggaagaaatctcgcacgtcccgtcttcattcaggaggagcgtggaagaactgacctggaaaaaacgcttcaactccggagggcggaaaaaccgcctctccctgggagatggttccacctcatactttccggaaagggcctgcacatccggctcatgaatccacaggaaagctttttgacacaccgcctgacggcacgccagccccaccacggccagcagggaaaggaacgccaggacaaacgcccacagggccagccgctttctccaccacgcataaacggcggccagccccgccacactgcccgcacaaacccagaacccccaggaacgggaaaggaaggccagggcatccgccagcacggaaaatccatgagaaagatcattccacataggtgctccagaatctccggaacatagtcaaagtcaagacaacaatgccgcctttcaaggcacgggccgtaggctgcgccccgataaaaaactcccgtcatcactcctgaaaatattcctccgcgcttttctcacaggctccaatcaggtaagaagcatctgaaccatgaaaagcgcagcacatcatcaggggctttcggaacagcaggttctggaaaaccggaccagatacggggtcaatatcctgactcccccggaaaaggaacccctgtggaagcaatttctggagaaattttcagaccccatcatcaaaattctgctggtggccctgctcctgtccgtaggcgtggctttctaccagtttttcaccggaacggaaccggccagcgtcttcctggagcccgcgggcatcctggcggccatcctgctggccacctgcgtggggttcgccttcgaggtaagcgccaacaagaagtttgaaatcctgaaccaggtcaatgacgacaccatggtccaggtcatccgcggcggcaatatctgcgaattgccccgccgggacgtggtggtgggcgatatcgtcatcctgaacacaggggaggaggtaccggcggacggtgtcctgctggaagccgtttccctccaagtcaatgaatccacgctgacgggggaacccctcatcggcaaaaccacgaatgaagcggaattcaacaaggatgccacctacccctccaaccacgtcctgaaaggaaccaccgtggcggacggccacggcgtcatggaagtgacttccgtgggggacaaaacggaatacggaaaggtttatgaaggttcccagatcgacaacaaggtgcagacacccctcaaccgccagctttccaggctgggcgatctcatcacctgggccagctacgccatcgccgccctcatcgtcatcgggcgcctcaccctgtatttttcccatctgccgggccccgtggaatggctgagcgcgggaacctacattctgaataccgtcatgattgccgtgaccgtcatcgtagtcacggtgccggaagggctgcccatgagcgtcactctgagcctggcgctgagcatgaagagcatgctcgccaacaacaacctggtgcgcaagatgcacgcctgcgagaccatgggggccgccaccgtcatctgcacggataagacgggcaccctgacgcgcaaccagatgaacgtgtacaaggcggatttttacgggttggggaacgccgtcccgacggaagacgagccgggcaacctgatcagggagggaatcgccgtcaactccaccgctttcctggattacgcagacccggaacatatcagggccctgggcaatcccacggaaggggcgctcctcctgtggctgcacgggctgggcgtgaattacctggacctgcgggaaaacgcccacgtgctggaacagctcactttctccacggaacgcaagtacatggctaccgtagcggaatcccccctgctgggcaaaaaagtcctttacgtgaaaggcgcgccggaaatcgtgctgggtctctgctccaccgtcctgactccggaaggccaggtacccgccgcggacatgcgccccgccattgaggaacagctcctggcctaccagaaccaggccatgcgcacgctgggcttcgcgtaccgcattctggaggatgacgccccggtgttcgaggacggccgcatcatccgcaaaaacctggtttacctgggcatcaccgccatttccgaccccgtccgggacgatgtgccccaagccgtgaaggactgcatggacgcgggcatccgcatcaaaattgtcacgggggacactcccggcaccgcacgggaaatcggccgccagatcggcctgtggacggaggaggattctccggaccgcctgatgacgggagtggaattcgagcagactccggacgcggaactgctggaccgcgtgatggatctgaaaatcatgtgccgcgccaggcccatggataaggaacggctggtcaaactgctccagaagaaggaccaggtagtggccgtcaccggggacggcaccaacgacgcccccgctctgaacgccgcgcaggtggggctttccatgggagacggcaccaccgtagccaaggaagccagcgccatcaccattctggacaattccttcatgagcatttcccgcgccgtcatgtgggggcgttccctgtacaggaatatccagcgcttcatcgtcttccagatgaccattaacgtggcggcctgcctcattgtgctcatcggcgcattcctgggcacggaatcccccctcaccgtcactcagatgctctgggtgaacctcatcatggacaccttcgccgcgctggcgctggcctccctgccgccggacgaacgcgtgatgcaggacccgccgcgcaagaccacggaccacatcatcacccgccccatgggccggaacatcctgggcgtgggcatcctgttcgtcgctttcctgttcggcctgctgcaatatttcaagcatgcggacattaccagcctcacgcagttcagcctctgcggctacatccgcagctacctggatttttccgccccggaacatgaactgacgggttatgaactgtccctgtttttcaccattttcgtcctgctccaattctggaacatgttcaacgccaaggcattcaacacgcaccagagcgcctttgcacgcatgggcgccagcattggcggcttcggtctggtagccctgcttatcttggccgggcagtacctcatcgtcacctttggcggaaagatgttcaacgtggtgcccctgagctggacggactggggcctcatcttcgcaggcacctcccttgtcctgtggttcggagaactggcgcgggcattcactccggataaatccggcgcccgctcctgaaccgtccgggggaattccccgcgcgcatgacgcggacggcgacgccgcccggaaaaccttctttcaacaaaggcgcccgcaggcgtgtcattcccagcatggacttgacacgcctgacgggctctatctccagccccgccgttttcctcttcctgctttccctcttttttgccgggtgtaaaaagacggaacaggttccgcatgaaacgcccacgcttatttatgaacaccccgtcaccatggatattccggtgacgggcagctgggtgggccacctggacggcgtggacaacgcctccatcgtcccccagattacgggctaccttcaaacgcagaattacgccaatggcgctattgtgaagaagggggaagtactcttccgcattgacgattccacgttcagggaccaggtatccaaggccaaagccaccctggcccaggcacaggcccagctacagcagttgaattacgacgcggaaatttacaggcccctggctgcggagaatgccatttccaagcagaaatacgaggatacgcgcctgtccgcccttgccgcggaagcacaggtgcaacaggcggcggcggccctggccctggctgaaaaaaatctttcgtatacggtgctgtacgcgccttttgacggaatagccggcatctccaggacaaacatcggcgacctggtcagcccggaaagcggcccgcttgccgtcgtctcctccgtcaatcccatccgcgtcaatttcgccgtcacccagcaggaatggattcagcaggcggggaaaaacgggaatgaaggcgtccagacgggcagcaagctggacattacgctgaaagacggcaccaaatacccggaacaggccacggtagttgccattgaccgggcgttcaatccccagacaggcaccatccgcgtacaggccaaccttcccaatgcggactatctgctgcgccccggcatgttcatcatcgcctcggcccggctggccaccgtcaaaaacgcgctgaccgttccggcaaaatcccttctttcgacacaggggcgctttttcgtgattgttctggacgggagcaaccacccttccatcatccccgtacaggccgggacgcagcttggagaccggcagcaggttattcctctgaaaccggattccctcaccccccaaagcaaagtggtcgtggacggtcttctccaggcggaagcagcctccagaaatccggccgcccgcctgaaagcggtacccgccagcaaccaataagctcctcccgccatggctgatttcttcatcaagcgccccatcctttccatctgcctctccgtcatcattgtcctgctgggggccttttccattctgcgcctgcccatctccgagtacccggacatcatccccccctccatccaggtgacggccacttatcccggagcggactgtgaaacggtggtcaagtctatcgcatcacccatcgaacagcaaatgtccggcgtggacggcatgtcctacatgacttccgtcaacaccaacaacgggcaaatgagcatgatgatcctttttgaaatcggcacggaagccaacatggaccaggtgctttcctatctgcgctacgggcaggccacctcccagctgccgtcggaagtcagcgcgctgggagtctccctgcgcaagacaagcggtctgcccgccctggtcgtcagcctgtattcgccccaggggacttatgacggcctctggctggccaattacgcctatatcaatatggtggacgccatcaagcgcgtgcccggagtaggagacgtgcaggtgttcggggcaggccgctacgccatgcgcatctggctgaacccggaaaagatggccgctctgaatattacggccagggacgtgatgctggccgttcaggcccagaacgccgtgaatcctgcgggcaagataggcgcacagcccgctccgccggaccagcagctttccttcaccgtgaaagctccaggccgcctgaccagcgtggaagaattcgaaaatatcgtggtacgcgggcaggacagttccatcgtaagagtgggagatatcgcccgcgtggaactgggctcggaaacctacagcctcagttcttccgtaaacggcatgcccgccgcttccatcggcatttacgaggcgcccggaggaaatgccatccagctggtggacaatatcaaagacctgctgaaggatacggatatgcctcccggcatggattacctcgtttccctggattccacgctggccgtccgcgccgggattgaagacatcgtcagcacgctggtgattgccctgggcctggtggtgctggtggttttcattttcctccagggctggcgcggtacgctgattccggcctttgccgttccggtgtctatcgtgggcgccttcatcgcctttccattattcggtttttccatcaataccatctgcctgatggggctggtgctggccatcggcctggtcgtggacgacgccattgtggtggtggaagcagtaaagaaccatatttccaatggagaaaagcccctccaggccactattgcggccatgaaggaagtatccggccccatcgtcagcacggcgctggtgatttcctgcgtctttatccccacgctgctgttgcccggcgtcacaggcaaactgttcgaacagttcgccgtgaccatcggcatgtccatcatcatttccgccttctgcgccctgtccctcagccccaccctgtccgccgggctgctgagaggggggaaagctgactccattcccctgctggggccctttttcaaattgttcaacaagggtttcaacaaggcgcgcgactggtacgtggaaatctgcgccagtcttatccggcacatgtggctgtccatcctgctgctggccgccatgaccgccctcctctttcccctggccaaactcattcccagcggattccttcccaatgaagaccagggctacctgttcggcggcgtggaactgccggataatacatccctgaacgtcacggcagacaccgccgcgcggattgagaaaatcatcagggaggatccgggcgtggacgtagtgactaccgtcaacggcttcaacctcatcagctccgtccaaagttcatccaactccttcttcttcatttccctgaaaccgtggtccgaacggactgctccgggcatgacggcggacggcatcgccgcacgcctgaaaagcaggctgaacgcggaaatttcctccggcgtggcgtatgtggttccgccgccgcccctgcctggcgtaggaacgtccggggatgtcacattcctgctggaggaccgccagggcatcggggaaaaattcctggccgccaacacgtccaaattcatcgaggcagcggaaaagaggccggaaatagcggacatcagcaatttcatgtctccctccaaccttcagtacaacctgaatgtaaacacggagcaggccactctccagaatatggacgtggatgaaatttacgccaccatccaggcatacatgggaagcaccttcctgaacaatttcaatatttacgggcaggaatggcaggtgtacatgcaggcggacgcaccgtaccgggacagcatcgacaagctttccatgttctatgtgcgcaacaatgaaggagacccggttcccctggattccgtaatcaacgttacgcacggctgggccccggaattcctgatccgccagaatatgttcaacagttcccagctcaacgtcaccccggcttcgggctattcctccggccaggtcatgaacgccctggaagaagtttttgcccagaccatgccgtccggcatgggatacgactattccggaatgagctaccaggaaaaacaggcgcagaaaggtatcaccatcggcatgatctttgcggcatcagccgtgtttgtctttttgattctggcatccctgtatgagagctggtccctgcccgtagccgtcttcatgaccgcccccattgccatcctgggagcatttctggccctgtggataaccgggctggacctgaacatttattcggaaatcggcctcatcgtcctgattgctctggcggccaaaaatgccatcctcatcgtggaatttgccgtgctggaactccgtcagggcacggacctgctcacggccaccctggatgcggccagaatccgcctgcgccccatcctgatgaccagcatcgcctttatcatgggctgccttcctctggccgtagccacgggagcgggcgcagcggcgcggcaggtggtaggcatcggggtcatcggcggcatgatgacagccgtcttcatcggggtatttttcattccttccttcttctacctgattgccaaacttaccgggctggacaaaaaagcggcgcggaaactccaggaaacggaacagggaactcccacccccgcgaagcaggccgaatgacacttccgaaacgggaaaacggctccctcacagcttcccattccccctacatccagaatatccaggcccagaaagccttcacgaaaacgagcaccacattaatcagcagccccaccttcaccatggtcatctgagggaattttcccgtcgcgaaggccagggcgttgggaggagtggaaacggggagcatgaaggcgcaggaagcgcctatgcctaccagaagcaccagcggcgtagcagacatgcccatggcggaggctaccgtgaccatcagcggggccaccagggccgcactggccgtattggaacagaattccgtcagcgacgtgatgaagaggctgatgatgagcaggatgacgatggggctctgccccatggcgagagaagatacctgatccgccaggaatcccgccgcccccgtctggacgagaatgctgctgagcgtgatgcctcccccgaacaggagcaggacgccccagtccgtatttttggcgatgccgctccagttgataaccccgcacagcggcagcagcaccgcagcactcagcgcgatgatcgtatccatggacggaatgccgcccaaagcagaggaaaggaaactgctgcacatccagctcccggccaccagcacgaagagaataaggacacgcacctgcctggcattcaacctgccctccgtttctcccccttccgtcggcgtcatatccacatgcatccccagacgcggacggaagaaaagatacatcaggcagaaaacgatcactccgaacaccaggacaatgggcatggcaatccggaaccattccgcaaaccccatgccgagttcatgcgccgcaatggcattgggaggagaacccaccagcgtccccataccgccgatggaggcgctgtacgccacacccagaatagcaaaaggagccgtcgtcttaagtttttccgccggaatgcggtccagaaggccgatcaccagaggaagcatcatcgccgccgtggccgtattggacatccacatggaaagaaacgccgtagccaggaaaatcagaatcaaagccatccccagactcccgcgggccattcggaggatttttcccgccagccaggtatcaattttctgttcgtggagagccccggccagggcaaagcccccgaaaaacagaaaaatggtaggatccgcaaaaccggacagggccttcgcccccggcagaatccccatcaacatggcaagcaccggcaccagcagggaggttacggttacgtgcagggcttccgtcagccacaggatgccgataaaggtaagaacagcaagccccctggccacctccgattctacgggaagccacttgagcatagccaggaaaagaagcacgtcacacgcaatgatgatgtaattgcggtgccctttgggagtgtctgtagtacggtggcgcataaagcaaagataaacgacgctattttctttgtacgcatcagaaaaacagtgtcaatgcttttccataaaaatcccggaaaaggcctttcccggaaacagggaaaaatggaccagcgcaccggcttgaggatacgcacggcgcgcattaccggaaaagcagcgccacttcttcctgctcctgaaaaattcaggaagtccagacacgcaaaaaaccgccatgcaatcacacggcggcttgtaacaactgtttgattggcgcgcggaggggcagcctccgcccgggcaattattcggcggcgggttcagcggccttcttggcagccggctttttagcgggggccttcttggcggcggcagccttggtttcagtctttttggccggggccttggccgcagtcttcttggcgggagcttccttggcggcaggcttggcatccttggcaacgggaacggccagacggataggcgcattggaattcaacttggactgttccttcttacgcttgaggtattcaatacgtctgcggcgcttggtgactttgcggatttgctgtcccatagtgataattgctatgatatttactaattcttacgagctccatgtggcacatgggcgtggatacaactaccaaccccacctcccttacgcaagcacaaagcgttattaaggcacagaaaggcggaggcagtccccggttaccccaacccgcgcggaagaggaaaacaacttggatgaaggaggctttaccacaatttcagcgcatccacccggaccggctgttcccagcgcagatggttccggattgcggaagcgatgaattccaggccgcgctccaccgccgcaaccagtccatccccggcagccagccgtgccgcgacggcggcggacagggaacagcccgttccgtgagtactcacatcctgtacgcgcggacgctcccattgccccagcaggcagccgtccgggccggacagcacgtcccggcagtccccttccagatgcccgcccttcagaagaacggggcatccgtacctaacagcgaggcgcgcggcagcttccggcagttcatcccttcccggattaacggaagagcggagcaatacggcagcctcatccagattgggcgtaagcaatgccgcacccggcagcaaaagctcttcataaacagccaccgcttcttcccgcatcaggcggtcgcccgccgtggcgatcatgaccgggtccaccacgacgggaatatccgccccgtccagcaccccatgcaccgcacggacgatagccggggaatacagcatccccgtcttcacggcgcgcacgggaaaatgttccagattgatgcgcacctgatcagccaccagcgcagggtccacctcctgaatgccgcgcacagtccccggcgcctcggacacgacgcaggtgacggccgtaagcgcaaacgcccccatggcatgggccgctttcaggtcagcctggagcccggcccccgcggagcagtcggaaccggcaatcgtcatcattacgggaatactcatggccttgtttttaatcgggaaggaagcccttgaacatcccaaaatccgcatgtgccgcctcaatgtcacaaatccgggtgggaaaacaaggagggaatgccacaatcatcccatgacgcacgcctccccagccccggatgaacaggaattctggcttttcattcaggatgcccctctgccctccgccgaggaattgcagaagaacatgttccgcctggacggctgtttccggctgaacctttccggtgaaccggaaaacgctccggaccatgtgctggaaggagaatatctggatgaagagggagaatcccagctggacgtattctgggtcatggaaacggacgacgcgcgccaagctttcaaaaaggacggcgcagctctccggcagatagggaaccgcaccaaaatgctgcgcttcattctggaagacgaatatgccctgggccatgtattcgccatgattcacgccatactggaacaccgggacggcctgctggttattccggacacccggggaaacattattctggaacggaggaaagctttggattttctgaacagggaaattcgggaaagttaacgtttttgcgtttgcggcgcagggcttccctcgcgttccgcattcagttgaagcgccttctttttccagacttccgccatatccgcatcctgaggggtcccttttcctgtgctgtagcagacggaaagcatcagcatggcgttgacgtggtcctgcccggcggccagccggagccagctgaacgccttgccctcatccacaggcacgccggaaccttccagacaggccagtcccacaatatactgggaatgggcgtctccggctgaagccgcctgttcataccacttcatggcacgctccatatcccgctccaccccctgcccctttgcataaatgttccccagatagacggacgaaggcgtattccccccgttggcggccttctccagcagcaccaggccggaagcggcatccttctcaacccccatcttcccctccatgtaagcccggcccagcagccccatggctgccggatgttcctcatccgccgccttgtgccacagccccagcgccttattcaggtcctgatccgcgccatcccccttgaaatacatcattcccaacatgtacagggcgtttccccgctgagtccccgggcgggcaagcccgtactcaaaccactccctggccgctacggcatcacgcttgattcccgtcccatacaggaacatggcgccgatgaccgtttccccggaatacccggaaccggcctctgccacggaatcacaccaggaccgcacatccagcggatgaacccagccattctgcaatccctccgcatacagggcagccacatcattgagggctttcacatgctcgctaccattttccttctcgcggacggagcaagcaacagcagcgtccagacgctctctccatgtctccgcctctttccgcaccgcagacggcttttcccgttccgcagaagaagcagcccgcttttccccggaagaaggggcgcggtcacatccgcacaaaaaaaagaaggcggaggaagccgcacataaagagacaacttttttcatcatggccattaccataagacagcctcatcaggctgccaagaagagaaatgacggaaacgccgcacccgcacgctatggaagagcgaaaccgaagagccggattccctctttttgcattgaatattttcctctttttgctctactgaaaccagttcaacctctgatgaaattcgttccgcccctgtatctcttgacatgcctgggcctggcgttcctgggaagtttttcctgccggggctccgcaacggaacttcccgtaaaatacatttttgagctgtcggatgaaccggtgaaagtgcaccctggcaaaatagacaccaagagcgttttcttccccaaatacgcacgcggaacctctccggaaaccctgaagcggcaggcagccctcttccaatcccatactccccacgaggccaccaaaagcaaaccggccatcagcatccacatgaatgacgacaaaacggaaagggacgtccatgagcggtcaggctatgagtttcaccatgcggaaaaccaggaagaaattgtcatcacaaccgaaacgccggatgaggaaatctggctgaacgacggggatccggacagcccctttttccatacgccccgttccgccgccaatacggaaattcgtgaaatccccacgtcttccgattcctggcccgcctggaatgaagaggaagtcaacctgcacatgaatcttccggaatcggcgccgcgccccctggtagtgcagccggctccgtccggagccatccgcaccatcatcaaatcctttaacggaaccgtttttgaggcggatgcccagcccatgcatcccgtctgggatcagctcccgcccggatacgttcctatcccggctctcccggcctatcagcccaccttattgaagaaattacaatagaagggggcaaaagcctcagaacttgaagcggacagccccgaaaacagaccatccattgaaagctttggccgttgccgagtccacatggctggtgacatactctacagccagcatcagcttgaccgcattgacggcctccggacacagatagcaattcagccccaggtaaaaggaatgcatgctgtccacccatgcgggataatgggtgacgctgggcacataacgggtattcagcttcacagaacggtttccaaaggaacactggtattgaaagacgccctcaaaatgcggggaaatccggtaaacgggctgcagaaccaggccgtacacattctttgcaccgggctggcctacaattcccacgcctgccagcaaattccccatgatggagaaagcgccgcggctggcgtcccagctcagggaaatcacgtcctgcgcgcccgttccgcagtaatcggacgtggaagggattttccttccccgccattccgtaaaattatgggcatactggtaccccagaaactggctgtcccacataggagaagccaccttccacttcatagcgttcaggataaacaggttgtccgcagaatgaaactggatttcatccttcaaatccgtaccgttcgcattcaggtaaatgccgtaggaatggtacaggctcttggcatccttctgaaaattggcctccagaccccagttggaaatgggaatcaattcattgcacagggcggatctttccactgttttaatccgggaggaagccaggcaatactccgacgtcaggtgaggcgtcagcttaccggccctgaacttgacgccgggcatggtcttttccagataaagttcatacagggaccactccgtatggctgccgatccattctccccgcacttcacggtgctaaccttccaaatcccccacattcgtcagattggacaggcgccaggaaccgtcccccatcaggatgtcgccgcccaggtaagcgcgcctccacccgttgttatggccgccggaagacgggcagaatttattggccccattggggctgacggctgctgcctgatactggccaatcagcgtcagcttcaccttcctgatccatgaggaatcattccggtacagcaccggaccgcgatccagcacacggcacagggacggcagagagcccccggaaaccggctgggactgaactgctcccgcgccagcttccgccgccggaaagacggcataccaacaagaggccaacaggaacattcccggaaaaacaagcttcatcataggctaaacaaacaaattgggcgcacatcttaagaagccctctccgaaaatcaagcccagatgctcctttcgacattgttgttttctgaaagggttgttacgaagaacggcaatgatggacgcaccagtgcgcccatccggaacgtctccatcagaaggccagggacgcaggtttcagcacggcttggagttacggctacatcggcctgttgtatctccggcctgatgaaccgggccatttcaatcacttcctgtacgatgaagaaacaacgatgcagcagcctggcatcatcgcgaacagttaccggcaccaaatcatcactccggcaagctttccctcccggcccgtatgggggaacatgcctgaataattatttcccgctcctgcggggaaaggccgtaaatgtcttccatcagctcattcatccgctcatccccttccgggcaatagcggaccgcgagagcgtccgccagcccttccacttcccgcagcagggacagaccggggacccggatgggagcccggaggacaggggcggtatccatctggaaaaaatccccctgcatttttccccggcggagaaaccaaaactgcatcaggcgcgaattgaacagggccgccagatatttcatgctcacgcgttccgagcgtatcacgttgaatgccatcatcacataagcttccttttccgtataggagaaggttggacgggcacacttcctgacagccagaattttggggccgggccggaaaaaacgttcctgccggggccagtgcacatggtaatatttcatgcggcccatgcgtgtttcccgccgggcctccatcaggggacggaatttttccaaatggcgcaaaagcgtaacggcctgctccgctccgttggacggggtcagatataacagcaccttctccggagctttcagtgcatgccgccctgcctggacaggttcatacagaggtttgagaaaacgccgctcccgttccggcaacaggccaaaatacccctgaggcaagacaaataccccatcccccctccggattccgtaccgccgcactgtttccggcgccagattctccagagctcgggaagaaacgacgtcaggattcggcacaatcccctgcgtcatttcctttgcggcatccagcctgaaattccggcaggcatccatcttttccagaagatgccgctctgctgcagagcagaaggacaatccttccctgacgcacgctccgacatcttccggcaagggaaaccgacggtacggctcatgttccagaaatgattccacgtcattcaaggagccgccaaaacggcggtattccggaaccaggcgtccgcctccctctccctttttctccgccagaacagtcatggtatggacgcgggcggattcaaacacgcggcaggctccgaaatccgacaggcgcagcaaaccgcaatcttccagcagcttgcggcggagagaggcggctcccgcattagacatccacttgttgggaacgaccagatgcattacgcccccccgcttcagggcatccagccccacacaggcaaacacgtaccagtaatccatgcgggaagagcagtaggaagcaagagaagaacatttcaaacggtcaaataattccttgttccctttttctccgacaaaagggggattgccgatcaccaggtcaaagcctccttcctccatcaccgttgaaagaccctgacgccagacgccggacgcagacatatccagactgtccccgcacaacaggcgatcccgtaaatccccctttcctccggcggccaaccatgcgcaacgaaaacggaaacgggccacctccaatgcctccgcgcaaacatccactccgtaaatattctcttccaaaacggcgcggattaaatcgggctccgggcaatccggttccagaagctttctgcgggcgacaagctcccggagcattcccatggtgaatgctccggcccctacggataaatccagcacacggatacttcccagcaacccggcttcttcatcaccgctcttaggagaaggcaatctggattccagccaggaagataccgcttcccgggccatccagcgaacaagaaaaccgggggtatacaccgtcccggaacggcgggcgtccgtcaggaaacgccccagcaatccttccagcacggaaggagtaacagcccggcaggcatcctcttccctcaaggaaaaagcgaatccccccggcagcaagccctcatggcctgcctgccgtttctgcaagttgtccatcaaaacctctttcaatcgttcccaggtttcaggacggcccccgttgcccttctccacggagaaatactgagctataaaacaatcctgaacgttccgctccttcactgcggcattcgtacactactggaacaggccgcgcaaccaaaaggagatcacctatatgcgcgcatattgaaaaactttaaccgcccgataaacatttgaaaaatatcccctattattattttccggcgcagcgctggatgaaaagtcaatcatggccatgatgaatcaatcgaaaagcgcttccggcagaaagggaatttcaagcatcgatgagacaggaggctaaggcaggaaatgccccgccagcctccccatgctgacgttgtcaccttcttcaaattcagaagaatttcctcaattcgtctctctattcccttattttgcaataaataaaatccggctttgccatcagcaagccggactagaaaagaaatggtaccccgtcacgggctcgaaccgtggacaaactgattaagagtcagctgctctaccaactgagctaacgaggcacaggaatgatggcgttccttgcaggaacaaccggatggtaccccgtcacgggctcgaaccgtggacaaactgattaagagtcagctgctctaccaactgagctaacgaggcatgtatccggcgattcccccgcgacaagcaccacccatgaagatggagccactggtcggaattgaaccgacgacccacgcattacgaatgcgttgctctacccctgagctacagtggcatcgcgagaagcgcacaagcaagtaatcataagcaaccccttttagcaagtcttttttgcaataagaccgtttttttacgccttgaatgcggaataaaagccaagagcggcaggtgacagtagaagagcttgcataggcgggggaaacatggtggagtgcatgtcctcaaagagcttttctttccctacttatcatgaaggcatattacattttccagcaggcggacgaagaaacaatcagcaacattctggactggatgcgcaaccaggaacgcgccatttaccgcgctgccgtgcgtgaacttggagccctgaaaaaactgcgccccgaattcatccagcgcaaacctcttcaggaacaattttccttcatcaagaaaatgctgtcatggaaacccagcaatgaaatcggtgaccatctgcttcaggtctggctgttgcgcaaacaccaggacatgctgattacgttcctgaataccctgggcatcccccatgacggcaacggcattgtcaatgaactgccggaaacgctagacaaggagaaactcgccaaagctgtggacgaactgttcgaaaaataccctgcaggcgtagcgtccgtctacctccagatgttccagctccagacggaagacggctgggaagaactggccgaggttctggcgaacgatccccgcgttaccatccgttgacgttattctccttcgggacataaacaagggccactccgttccggggatggccctttttatggaggcaaacggacgctcctgccgctgttattccagttccaggcggaacaggcgtccggacggcacgggacctgtttgaaacagctgcaatggaaagcatgccggaagcgcaagcccgtcaggagggaacgctgtccggctgttccggatggaatgaccacccctcatctccgtggtacaccatcatacgggacatgccgccgtcaatgaccagattctccgcattgacaaagctggagccgcatagaaagaaaacggccttcacgatatcttccggcgaaccgacgcgcccggaaggatgctgaaaagcatcttccggagacaggacgccgaacacccccgtgtcaatccagcctggactgatactgttcacacgaacgccgaaaggggaaaggctcatggcgagagcgtgagttaaagaagtgagggcgcccttggccgcactatagctttccgtatccttctgggacatggaagcgcgggtggaagcaatattcacaatggaagcgccgcgggaaaaatggtcgcgaaataaaaggctcagcagatagggcgcggaaactcccacgcgcaaaacttcattgaattcctcgaaggaacagccggaaagaatgccgcgacgcgtgatgcacgcattatttaccagcacatccacacggccaaaacattccaacaccttttccgcaaaagaccgcacgtcctcttccacacccgcgttgcccgtcacgcaaagatgcccctctcccggcaattcctccagcagggaggccgtttcctcatgcttcacatccaaaaccgccacccgggctcccgccgcagcgaaagcttccgcaatggcgcggccaatgccgcaggctcctcccgtcaccaccacggtactgccggaaaaatcaacatccttcataggctgattgtcatattccactcaagaaagtcaatcatcgccttccggcatacggtacttaacgtgcatacattacatcgcggtaaagccccatggctctggaaaggagaggagaacgggttaccacgtccgtttccacaataagacgggccatggaaccggaaacggccatttccgcttcctccgcacggcggctgatacgctccatatccctggttttcaccagattcatacgtccggatttttggaaatcatcaacaacatagcgcaaccttttcaacttggccaccacttccaccagctccatggcgcactggtcagccgttccggcatccttgatgctgcgcaggagaaagtcaattctctccaggcacatgcagaactcttccatggccgcgacaggatcggcccagaactcctgaaaatcgattagcctgggttgctctattttgagcccctccactgccttttgcatggaaggggaatcatacatcctggccgtcgtgagcttcaggagcgcccggaaagcgcgtttgcgctcatcctccgccttctttctcatcttttccagcccatcatggaaatgccgttcaaaaccgggaatccagtctccatacttcttctccattctggcaatgttgttcatctgctccctgaccattcgtccctgaagggctacagatacggcataggcttccgccgcaactttattgtcaatcccctccagcatgtccaccatggtggaatactgttccagataagccttcagaaacggctttatcttgttgttcaaatacagggccacccgttcgtccgtcaggctgagaccgcacttttccagatcattcctgatgacatcggaatcataatacctgaattcatggagcttcagtattcccgacatcatccggtcgcgggccttgtccacgcgctcccggagaatggaatgaaaggcgggatgcatcttacgcgattcttcatgcacgcgcggattcagaaccatcaggcgcccgcaattcatatcgtaaaatttaaacttctccgtcaggcgcccaagttcattcatcagggcctctcctgcggtacggtcctggatggaaacgaccagatccgtcatctgttccacttccttcaggcgcagggaaagcagctcttcataagattccaccggggaaagcctttctgacttccctgcttccgcagccccggcctccttttccttatctccgcaggaacacaaacacagcgccagcaggagcgcgcctcccatccacggcaaattcgggaacagagaaaaacaggagctaagcttcatgagaacgtagcgttgaggagggagaatgaaactccggcccgcatcgcggcaccggaactaccgtaaaaaagcgtcatcaaagttcaaggccttttcatttcatccgggaaaaacatttccgttccttcgacggaaaaaatattcatttaatataatgaacactcttctgaatcgggatgtcacactcttttatccatatcatcctgtctgccgtgattcttgatattcttcaatacggacatcctcttttgagagaggaatgcgggcccgtggttcatatcaacagggatatcctttccttcctggacgatatgcaggaaaccctggcccaaggaggcataggcctggctgcgccgcaggtgggcaggcccatccagctggtcaccatcaacatcccttccacagacgcaaccactacctggctggaagtggacggatgcccaactacgttgtcccgaatcatgcccttgaattttatcaatcccatcctgcatcccttcggcaaaaaagtgccgtaccgggaagggtgcctgagcatcaccaaagtatatgcgaacgtgatgcgccgctcctgcgtaagggctgttttaaccatgatggacggacggactgtgaccgtgaaatgcaacggactgctggcgcgctgcctgcagcacgaggtagaccaccttcacggaggcctgtttacggatctggtttcccccggtgaccatgacaaggtgatacggaggctcagattgacccatccggacgcttttgaagaagatgacgacagctacgctcgccgcatgaaggaaaaacgccacgcccaggcacgggaagcccggatgccgcagcctcccggaaaaacagcctgacgttcaggcaacaaacctatccccccttttactgcccttccctaaaaaacgccccggtttcctggaaaaaaaccggggcatccataatcacatggaaagaaaaagggagaatcaaacaatccagtccagaacaaccttgccggattttcccgaattcatggcttcaaacccttcccggaattccgtgtagggcagacggtgcgtgatgatgggcgccacattcaagccactgcggatcatggaatccattttatgccaagtttcaaaaatttcacggccataaatgcctttcatcttcaaccctttccaaatgaacttattccactcgatgctggaaccatcgggctgaatccccagcagggaaatgttggctccgttgcgggaattgtcgatgatgtccttcaggcaggacggagcgccgctcatttccaggcacacgtcaaatccctccgtcatttccagttccttcatcacgtcttccagcttttcacgggtcacgttcacggttcggtccgcccccagcgttttggcaagacccaggcggaaatcattgatgtccgtaataaccaccgtcttggctccggccttcttgcagacggcggcagccatgcagccgataaccccggcccccgtaatcaggacgtcctcgcctaccagatcccaggacaaagccgtatggacggcgttgcccagcgggtcaaaaatggaggcgatttccatcggtatgctcttgtggatgcgcaccacgttatcctgcggaatggaaaggtactccgcaaagcagccgggcctgttgactcccacaccctttgtgttgggacacaagtgcttctgccctgaacggcagctgcggcaatggccgcagacaatatgcccctcaccggaaacaatctccccgggcttgtattccgtcacggaagaacctacggactcaatcacgccgcagaactcatggcccacatgcatccctaccgggatggtctgctgggcccatttatcccaattccaaatatgaagatccgtgccgcaaatggctgttttatgaattttgatcaggacgtcattcgggccgacttccggcataggaacatccatcaattccaaaccggggccagcctgcgtttttacaagagctttcatgccccccattcatgctctttttcccctgcgtcggcaagctcaaaattcatttcggagcgccgaaaaagcctagggaacggaggcttccgcctccccttcccttcccatggaaacgcccggagcagctgcgggcgacaaacgccggaaagacattcctgttcaatcgacaattcagacacacacgcaatttgccctttccaacaggaaagaatcatgataccaaggcgtgcgagttctccttttgaacactttactctatttacagaaccatggcgaaatcatttttacccaccattttcgagcacccgtatgaaatagaccccaaatatgggaaaagcgttgcgtacttctccatggaatacgccattgataattcatttaaaatctattccggcggtctgggctacctgtccggctcccatatgcgcagtgcgcatgacctgcgccagaacctcgtaggcgtcggcattctgtggagctacggctactacaaccagatccgtgcggaggacgggtccatggccacgcaatacatgcgtaaaaactacccgttcctggaagatcacaacatcaaattcctcattcatgtctgcggagcgcccgtctgggtaaaagcctacttcctgaatccggaaacattcggtactgcgcccatgttcttcctttccacggacctggaggaaaatgacgaggaaagccgcaatatctcccgccgcctgtacgacgccaacggcttcacccgcatcgcccagtacgtactgctgggcaaaggaggcgcccgcctttttgacgaactgggcattgaaccggaaatctaccatctaaacgaagcccacggcctggctgccgccttccacgtgcttgccaagacgggcagcgtggaagaagtgcgcaagcgtttcgttttcactacccataccccggaagaagcaagcaacgaaaagatggacgtaaacaccatgaatacgttctccttcttcgacgggctctccatggaacaggtgcgcgccgccgtaggcatgacggacaatacgttcaactacacgctggccgccctgcgcctctcccacatcgccaacggcgtttccaaactccatggagaagtatcccgccagatgtggaaggactatgaaggcatatgccccatcatccatatcacgaatgcccagaaccagaaatactggcaggatccggaactggcggaagctttccaggcccgcaacaaggaagcgttcatccgccgcaagcgggctctgaaaaaagccctcttccgcatggtgggtgaacaaacgggccgcgtctttgacccgaactgcctcaccatcgtatgggcgcgccgtttcgcggcctacaagcgtccggacctggtcaccggcaatcccacgatgttcgaacgcatgctccagcgcaccaactatccggtgcagttcatctgggccggcaaaccctacccgatggatcatggcgctattgaaatcttcaaccgcctgaatgacttgacggccaaatatccccgttccgccgtgctcaccggctatgaactgggcctgagccgctacctgaaaaacggttccgacgtatggctcaacaaccccgtggtaacccgggaagcctccggcacctccggcatgtccgccgccatgaacggctccatctccgtctccaccaatgacggctggatctgtgaattcgccaaggacggagaaaactgcttcgtcattccggaagcgcccgcccatctctccccggaagcccgcgaccgctccgaccgcgataacttctacaacattctggacgacaagatccttcccctctactacgatcacaacgacaagtggatggacatcgttttcaatgcgatgacagacatctatcccgaatttgactccgaccgcatggcggatcagtactacacggaaatgtacaacagctaagatacagccttgtccctcttacgcaacggccgcctttctttgggaaaggcggccgttctttttgaaaccggtgtcaaaaacccacgggaagcggttcaagcttacttgggtacttcctcctccccggcctccgccgccaccttgtctgcgtcccgcttatgacggtgcgcaaaaacattctcctgctgccatacgcgggaaaaagcagacgtgatcagccctgtggaaatagcaatgatggacacggcaataaacataatcaccccggtaaaaatacgccccatgggcgtaataggcaccaggtctccgtacccgaccgtactcaacgtttccacggcaaaccagagcgcgtcaaaaaaggaacggaatttctcgggctgggcatcgtgctctgcaatataaattcccagggaagtgacgtacagcatgaacaggatcacggagaaaaacagaaaaaactcatcccggatcaggtaaaaagcctttttaaaactggcggcggtttcattaaaccgggccaacttgaaaatagccagtatgcggacaatccgcagggaataaagaatctgccagtctgtcccgaaaaacatgcccaggaacggcacgcagacaataaaatccagaatacccatgccgctgaaaatataagccttccgcggtttggcgcacagcacccgcaggatatactcaaacatgaagaaatagctgatccagtaattcaccttggccgcgatacggcctaccagaggatgaatatccggaatggcattcaacgtgtacagcatgaaccataccagaatcagtaccctgacaatgttctcccagggaccgaaattggcagcgcccagcttggtgcgggtaatctggggcatggcgggaattaggaacgatgggcggccttccactcgtcagccttgaagccgacgcatatctttccattggtaataaaaatggggcgtttaaccagcatgccgttggaagccagcagggctatctgctcatccaggctcatgtcggcaagctgatctttcaacttcatgctcttgtaaagcaatccactggtattaaaaaacttcttggccggcaatccgctcccttcaatccagctccgcagttcctctgccgtgggattctgttccacaatatggcgatcctcataagaaattccctgcccatcaagccacttctttgctttctggcaggtcgtgcacttgggatattcaataaataatgaagacatatccgcacgctagccccgtaaacacaccgggtcaagcggccagcgcagccatcccgacgtcatgacttgattggaaggctgccgatgtatccgccgttgaacacaaaacctgagaacgaaagcccggaatgcgtgcggataccgcagaaattctatattccggaacattaaagcaccatggcgcttcccaactgcgcgatggaaacgggattggcctgacgctcccggagcgcccccgccagagcctgggtagccttctcctccccatgcaccagaatgatattcctcttgggccctccggtcctgtcaaaatactccagcagttctccatggtccgcatggccggaaaaggaatccatctcccgtattctggcccggacaggatattgtttacccaggatgggaacctctttccacccatccataatcttgcggccaagtgtatgttccgcacaatagcctacaaaaagaaccgtatttttcggatcgccgatgttattcgccaggtggtgaagaatgcgccctgcttcacacattcctgaggcggaaataataatagcctgcccgttcattttattcaaagcctgggactcgcccacggaacggatcaaacgcagctgttcaaaacaaaacggttccttctcccggaacaggaaatcataaacctccttattgaaacactccggatgaatgcggaaaatctccgtcgcacccactgccatggggctgtccacatatacgggcagcaagggcagagtgccttcatggtaggccctgttcagcagataaagcagctgctgggtgcgttccaccgcaaaagccggaatataaacgcggccgcctaattccagagcctccttgatagcccggcagaacgtctcgtcatcacgggagggggcctcatggaaacggccgccgtaagtgctctccatcagcaaaatatccacatccggaacagggacgggatcgcgcagtaattcgttatctccccgccccacatccccggaaaacaggaaacgcttcttccgcccgtcttccctgtcctcaatatccaggcacacttgcgcagcgcccagaatatggcccgcatcataaaacgtgagtgtcacccccggaacaacgggaatgggccggtcatacccgatattcacgaactggcgcatgcaccgctccgcatcctgttcggaataagtaggataaacatccggctgatgaataccgcggcgcttgttcatcttattgatgaatgcgcagtcgtgctcctgaatgcgggcggcgtccgccagcatgagctggcaaagatctctggttgcaaatgtactgtaaatatttccctgaaacccctgtttcactaaattgggaagattgccggaatgatcaatatgagcgtgggacagaactaccgcatccacccccgccggggaaaaataggggaaatccttattgatatgccatgcctcctcacgccgcccctgatacatgccgcaatccagaagaatccggcacccgttcacctccagcaaatgctgggagcccgtcgtcgttcccgctgcaccgcaaaaatgaattttcattaatacatgtgtacaacaagccagcgggcaacgcaagaaatcaatacctgaagcctttcattcaatataccctttgaaagacgggaaacatcagccgcaaaacccatgccttttcttttttccaggccataaaaagagaaaaaccaataaactgcaccattcctccttctgtacagtattcctgtgaacatgaaattgcacttctttcccgcccgggttgcggtttccgtaaaaatgcatccgtcaaaaacttccccttcgcaaggcacatgttccatcacgaatgcacgccggaatacccgcatccaggagagccctccggtatcactgccaaaaataaaacctgcaggttattttgaaaacattccgttctgattgcaacccgcctcctgaaaaaagcgaccggcaaaaagagtcccgcctaatcttaatgaagcctttcagctaaaatgaacaggacaggaaattcccgccctgttcataatgccgttcaattacaaaaaattacttgtcctccggtttggagtccgctgtcttctccacctccacgtcaatgggctgggaaagctcgggagaaggccggacctccgttttggaggcggaagcatcactcatggtctccttctcggtcttcagcagttcttcttcaaattcagatttggccttcttgaattctcccaggctcttgcccagtccgcgggcaaattccggaagtttctttgcgccgaacaaaaggaaaacaatcaccagaatggcgataatctccggtgttcccagtccaaaaatagctaacatgttcatcatggagtactacagtatttttaacagatttttttcatgccggatacctcataatacgcttcatgcgtcatcagaggcctcccgttcctgtttctgctgttccgcaagccttctggcggcaaaacgctgaaaacgccagacaataataaatattgccagcaaaaagatgcctgagccgccccacaacagccaaaaagcggcggaagccgccttttcatcccccatttctccagcctggttccaataataataggataaaaccggattccagggcagtgaactgtccggcagaagatggagacgcgccatgcggttcatggccggcaaataggcagcctgggcggatgctttcatcagggaatctccctgagcctcatcaccccgtgtataatatacctgggccagcatgtacatggccttgggatcccctgtagcatccgccacacgccgcagcagcctgtaggcctcatccgcatccagttccccgcccttcccgttctggagcagctccgcggcctttagtgccgcagggaaataaccggcggcggcagcctcacgatacagagccagggcccgggccgcctgttctgcggaaggagttccctccagcagcatatccgccagggcagccatgctgtacggatccttccattccgcccctttttcaaaccaatggaaggccttttcccggtcagggggcaaatacttgccgtcccggaacattatgcccagttccatcacggctcccaaatctttacgggaggccgctttctcaaaccattctacggccttggccgcatcctgcggcactcccagcccatcccggtacttaaatgccagaaggccttgtgctgtcaggttgccgctttccgctgcctgaagaagatatgggactgacttttccggagaactgtccggaaccagctttcgttcataaacaagggcagcccataacgccgccttggaatcaccgtcatccgcctctttcttccacgtctggagagattttttataataaagggctgccgttgcttcatccttcggtcctcctgctccctgggaagccattacagccacctggtactgtgccgcggcattaccgctgtcagcagcccgggtaaaccagtaccgggccctttccaggttctttgggtacaggcggctgcctgtataaaacagcttgcccaaatccagcatggaatccacatctccgttattggcccttttctctgccaaggaaacatactcggacatccatttggacgtttccgcagcattaccctccacgtcataatgcacagccagctcccgggcggcagctggatccccattcagagctctttcgcggagaccggacaagtaagcctcaaaatttccctccccggcaggctccggagaggaaatattctgagaagcaagaagtggatgctgaacgagggacagtccccacaatccggcaaaaagccaccatctgcaatgtttcttcataccggaacaagtcattcattaatggcccctgtttccgcgggaaaaactgctggaggacctgcctccaaagcccggcttacgaaacccgccttcacgcctctgaaaacctcctccgcggcggtctctctcaaaaccgccttcacggcgttggaaccctccttcacgacggttttccctgaaacctctctcctgatgctgaaaacctccttcgcggcggtctctcccaaaaccgccttcacggcgttggaaccctcctttacgtcgctcttctttgaaaccggcctcgcggcgcagggccccatccccgcggcggccgcggaagccatctccacgacgatgaaaatctccgcggcggtcacgggaacggaagccgtaatctccccggaaatatccatcttccttgacttcacgttcatcctccgtctccacaaaacgagtcttcatttccggagtaggttcataagaatccccagcttcaaaatcttccggattaaacacataaccctcatcgggatcaacgcctctcccgccctgctcacccttggcgccccccccggcgacaagctgggaagcacctaggtatttacgctggcggggaggatttttcagtgacagagccacgtccgcatcatccaggaatttccagcccccgggttccaaatcccctccccacagggagccgatgcgcacgcgcaccaacttgcggacacgaaggcccaggcactggaacatttgacgcacctgacgcttcaacccctgttccaaaacaatgcaggcacggcgcgcagaagcgcggcaaacatatttggccttggcatttccctccggaatgcgtactccgcgcaaaaactgcatcagtacggaattatcaaaattctgatctaccgtcacccagtactccttttctatgccgccggtaggatgggaaagaacctgggtcaattcccccctattcgtcataatcagaagaccttcggaatcggcatccagccgtcccacataattcagatggcgcaggcgcggcggcaacaggtcataaacagtacctatggctccctgcgcttcgcggctgcacacatacccgcggggcttgttcaacagcaccacaacctcttccataggggtcatatggcggccgtccaccttcacgaaatccttctccgtcaccctcatcccaggcgtatcgataaccttcccgttcacttccacacgtccttctccaatcagcctgtcggccacccggcgggagtcaatgccgcaggaagccaggaatttattaatgcggatacctccgttttcttcggagccatgttgttcttcactcatattggtataatgtccgctatctcagcggatgattttgtattgtttatattacggcaattcacatcctcaaaaagaggagactttcttttgccggaagaaaaaagcctctcggttcatagacatccgagaggcttcctgtattaggaaaatgacttgccgtgcaaactccgccgggaaactctccggagaggataaaggcaagcttaagcttcatgcttggtcttcggcagaccgagagggctttggcccttcttccattcgccgcgttccttcagaagcttgacacgttcaaaacgcttcaggacggaacgcttgccgcctacggtaccggttgctttgaggctggaatgcttggacatgatcttgtgtttgtaaaaggttcagaaaaatactttacaccaccctcgcggtggcaggcgggatcttataacggaaggttccgaacttggcaagagaaatttggcgcaatagccaaatatatcactctgtggcatcccccggatgcgattccagccacttcctccacaaatccggacggttcaggcgcgtacgctccagagacttcccgtgcttccatttttcaatggcggggtggttgccgcccagcaaaatctccggaacagccaggccccggaacacgttcggcttggtataggcgggagcctccagcaaaccgttggaaaaagattcctccacggaagaacgctcatcccccagcacgccgggaatcaggcgcgctacggcgtcaattaccaccacagaggcaatggccccgttcgtgagaatatagtccccgatggacaattccatatccaccagctcttctactacacgatggtccaccccctcataatgaccgcagaggataatgagatggcctccggaggcagccaattccgcggccaatgactggttgaacgtacggccctgaggagtcatcagcacaacgcgggtttcccgccggcgaagttcctctacggcggcaaagataggttccggcttcagcagcatgccctgcccccctccgcaaaggtaatcgtccgttttgcggtgcttgtccgtcgtccagtcacggatattatggcagcgtatctccaacaatcccctgtcacgggcctttcccagaatgctgccgccaagaggggcttccaccatatccgggaacagggacaaaacgtcaatcgtcagtttggcggccataagaaaaaaacatcagcgttcgcgcttatggccgcgcagcatggcctcaatgaacggatccaggttgccgtccatcacgtcctgaatattgccggactctacgcctgtgcgcaaatctttcaccatttgataaggctggaaaacataggaacggatctggttgccccacccgatgtctcccttctcactgtactggcggtcggcttccgcctgctttttgtcttcctcaatctggtatagcttggcacgcagcatattcatagcctcttccttgttacgaagctggctgcgctcattctggcaggccacgatcacaccggaaggaatatgcgtgatacgcacggcggtttccaccttgttcacgttctggccgcccttgccgccggaacggtaggtatccaccttcaaatccttgtccaggatctcaatattgatggaatcagaaacttccggcgtcgcgtccagagaagcgaaagaagtatgtctcttcccggcggaatcaaagggagaaatgcgcaccagccggtggatgccgcgttcattcttcaaatatccgtatgcatactctccatccaccttcaatgtcacggaacgaatgccggcgtcatccccgtccgtactctccaaatacgtcacggaaaatccccggcgctcacaccagcggatatacatgcgcaataacatggatgcccagtcacaggcttccgtgccgtaagccccggcgtggatggttacataacaggaagcctggtcctgcggtccgttcagcagggtcagcaattcaaaatccgccagagacttctgccatctggcaaactcttccacagcctcccggcccaggtcatcgtcatccgcctcctgagccagctcaatagcagcgtcaatatcctccagacgggacttcagcgcggaaaacgcctccatcctgtgtttcaggggattcacctccgccatcagcgcccgtgcggcattctggtcatcccagaaatccggggcgctcatgcgttcatccaattcggctactcgttgttgaatgccgtccaggtcaaagatagctcccgagctcggaaagacggctatgcaggacagccgtgtcgagcgccgagagatctgcagcgatatggggatccatgcgcgggaacctatcacgaattacctggacggaaaagggcaaaatgccgtttctcccagtcatcctcttttactccgactcgcaccgggccatttccgagaataataaaactccgcacgctgaacaaaaccgctcctcttccgcaggaagaacatctaacaggaaatgaatatttccgaaaccaagccctcttccccatttcaatgccccatgggaaaaacagcagacaaaaaccttatttcattcccttaccttacatcaccgtcttctgcccttccccctctttccggaatgtggctcggccatccatatccccggcttcccataagagagcccggagccatgctacttggcggaattttcctctccaccctcaaaagggcggatccggcaggacctgagtttttcaatctcctcaaaagtcatgatgtgttctatctggcaagccacttcattggcgcgttcttccgggagagccaattcctcccgcaggaaatcaaacagaataccgtggctgacaataattttcccggcaattctgcggccttggggagtcagcttgacaggagcatactgcgtatactccaccagtcccatatccgccagctgcttgacggcagatgtaacggaaggcatctttaccttaagcatctctgcaatatccctcacctgggccgtcccgttcttttcagacagcaacccgatagcttccagataatcctcattgctcttggtcagctccaacatggtataaaatgaaagttaatactttagtggaaactaactcaagattttttccagccttttttggaatgagaaaaaaaaccgccgcgaatatgaccattcgcggcggttaaattaatcagcgtaatacgaaaacgggcttacttctcttcagaagggctccactcttcgttttcacgggtagccagattgaaggcgtgttccagacccaccatatcgctgctcgggcggagggcttcaaaggaagcggtttcgcggcggagctgttcggtgtcgtaattgacggccttgatggaaaggccgatacggcgttcgatgctgtccactttgatcacgcgggcagtgatttcatcacccaccttgatcacgtccttcacgcgttccacatggtcttcgctcaactgggagatatgaatcaggccgtcaatatcgccgtccagattcacaaaggcaccgaagctggcaatcttggccacctggccagtcaccatatcgcccaccttgaagcggtcattgatggattcccacggatcggactcaagctgcttgataccaagggagacgcgctgatcctccttcttgatttccaaaacgatggcttccacttcgtcgcccttcttgagaacttcggagggatgattgatcttgcgggtccagctcatatcggacacgtggatcatgccgtcgatgccttcttccagtcccacaaaagcgccgtagggagtaaggttgcgaacctggcccttgatgacggtaccaatcgggaaacgggattcgatatccgcccagggattgtcttccaactggcggacaccgagggaaatcttctgttccttcacagaaatggaaagaaccacggcttcgatttcctggtccagcttcaatacatcgctcggacgggtgattctcttgacccaagacaactcggaaacgtgcaccaggccttccacgcccttttccaattccacaaaggcgccgtaaggcaggagcttggtcacgcggcccttgacatgggaattgatcgggtatttgcgttcgatatccgcccaggggttgtctgtcatctgcttcaggcccagggaaacgcgttccttttcgcgatctacttccagaatcacgacttccagggactgaccgatatggagcatttcgctcggatggttcacgcggccccagctcatatccgtgatatggagcaggccgtccatgccgcggaggtcgacaaaagcgccgaagtccgtgatattcttcacgataccttccaccttgtcgccttccttgacggtttcaaggaagcgctggcgctggtcggcgcgttcggcttcaatcacctcacggcgggaaaggacgatatttttacggtcgtcatttaccttgacgatcttaaattcgtaaacctttccaacatactcgttcaggtcgcgaggaggaataatatccacctgggaaccgggcaggaaagcttccacgccaacattgaccataagaccgcccttgacgacgctcttcactttacccttaaccaggccgccatcgcggtacacgcccacgatcttatcccagttctgcttatgggcggccttttccttggaaagaacgacgatgccttcgtcgttttcgaggcgttccaaaagaacttcaatttggtcccctacttcgatttcctcgtcttcaaactcggaaatggaaatagcgccttcggacttgtagccgatgtccaccaaaacgacttggggacggatttcctggatggttccggtaacaatggaaccttcacgcaattcgcggaacttgctgtcaataagttccgccagttcagttgtgctcatttaaatggttgatgagttagtattaacgatctttctcatggccccttattgaccggcgggcaatcggggcgccttcccccgccgggcgaaaaatcggttgctttcaatatcagtttcacacaagaactcaaggcttttcttgaaaaactcctcccgattttttacggaacctgcggagcccctctggacggcggcagaaaacgagcgcacaaaaaccttgtagcacttccgtcccatgttaaattccggctaatgggaaaatgcaggaatacctgcatctatcagccactcctgccgcaaaaccatgaaaaaaaacctcctttacctgctcgcagcggggctgtccggaacagccttccttcacgccgcggataccgtcaaactggaccagccggacctggaacggggggctccgatcatgaaagccctgtccgaccgtcaatccattcggagcttttctgaaaaagcgctatcccaaaaagatttatcagacctgctctgggcggccaatggcatcaaccgtcaggaatccggcaaacgtacagccccgtccgccatgaaccgccaggacgttaaaatttatatatgcactaaaaacgcctcctacctctatgaccacaaggcccacgccatgattcccgtaaacgatggggacgtgcgcccggcggatgcccccatatgtctcattcttgtaacggatacggcggaaccctgggctgccatggacgcaagcattgtctcccagaacatctccctgttctgctccgggacgggactggctacctatccgcgcgccagcatgaacaaggatgccctggcaaaggccctgaaactaacctctccccaaacacccatgctctgtcatccggtaggatataaaaaataactacttccggctacattctccggacagtccggaaaagaaaccatcagaaatggaaataaattccacaacaggcggaattatggttccggcaaaatatccatgtagatgccgggagagctcccttcaataggcatcgcgcccacagcccgggcataaaaatcagccggaccaaccccgccgatgacaccgtatgcataccccagctcccgcaaacctttcagggcggaaaccaatagcacggtgcctaatccgcttctgcgcacctcttccgccactcccatggggcccaaaaaaccgcgagccgttacatcgtaacaggcaaaaccaagaatcttcttctcccgtgtggcaatataacaggaaatgggctggcggccaaacgcgactttcgcctcacttacccacttgggagaaaaattccggccaacccaatcagctaccaaatgacgttcgtaagcacccggacggcgaatcaaaaaaccttcccgctccagcctcctcaggtcttcttcaatatcgggcaaatcatacagccgcaccagcatatccatcataaccccggcaccgtatcacaactaagtgccgtggcgaataaaaaaaactggacaaacccatctttcaaccttagacttcgccgcaccacaaacaacgagctgtagcgcaggctggtagcgcgcttcgttcgggacgaagaggtcgcaggttcgaatcctgtcagctcgaccaatttccaagccgccttcgggcggctttttgattacttatttactgatataaaacaattttactcattaataactctgcacttcccctattttgcgccaaggcaaataaacagcatcatactgattgaatttaccctcctcacaggaacaaaatcaaacgggcaaatcttctcaattaagcctggaggatgtcgggggtatttaccgatgcagaggaaaaattatctatgcccaattctcacccctgtgccaggcagcatcacagccgctgcggaagtactctataacatccccctaaacaaaggagaatgaacctcctccacaaaaaagccccgttcatatttcatgaacggggatgagtcaaatgaagtcgaagcaggaagataaaaccgggttacttgccggattccggtttgaaacgagctgcttctgattcggcggtgatttttgcaggctcgatatgcaggagcttcctgaaagccgccagtccctcttgatcagaccaggagagagggttgaaccacatcgtatccagagaatattcacagctgttgtttcccaagttcttcagcttacgcgaatccaagaatacataccacaacattcccggcatcagggcggatataaaacgattatcaccctctgtcctcactactccggcgtcaggcagactctccgccttcttgtgcagaaccagcaggccccccacgggaacattcccccgcaaagtttggacaatgcggcactgatactccttgtcccatagaacgccttttccgacagctctcggagaaaaccgtgtttcatacacgcacaccagcaacactgtatccgaatgtttcaagtaagcggccagcatatcttcgcgggattctggtgcaatatctgctgttttcaatacctcggcgcgggcagaaactccgcacaacaaaaaaaccgtcacaagaggtaacaataaaaatttttgaaacataaaaaatatttaccccataaataaagaaaacgcaaatgaatgtttcgccatttccagacatctttttattgctccatgctaataaaaagggaacaggtcgccctgccccctgaaaacaagtgggattcccaattattccttatcgtccaatgtgtttcgatacagcaaccagactcctccggacagaaatgatcccacactctcatcgtcgccggggcacatccctacatgcagggaatcgccgaaaatcacaatatccccctgctgcggagtactgtaatcttccggagaaatgtaatccggaccgtcgcatcccatgttcttcatgataatgtcgttcagatgtccggccatgacctcggcgctgataataatatgcttacctaaaccggacggatcgctctccggcgtcataccgggattcagaatgccgatgtcacctcccatgttcagcacattattggatgcctgggagccattagggtacttagctccgttcagccggaatccgtagcggttcagcgcaatgctcagacgcgtagcacaggtttgttctcctgccatatccgcagcaaccttctctccgaacttctcccagaccttatcgctctgatgagaaggaatcgtcttgtaatccaccagaccttggtaatgtcccagcaatttctgagcatccgcaggctgcatcaggttcctaggagcgttgatttcccaaagttccagttcggaatctcccatcttgggaacaaactcctccgcattggggtaaggagcaatttcttccggtacggcaaggttctcatgatgcagtttcgcatagtggaagccctttttaagttccttgcttccagaaacggatgtggacgaatgtgagccagtcaattccgctaccttttcaccattgatttccagatagccgttgtcgtcaatctgaatcgtgaaattataggttccatcttccggaacgcggatatatccttcccagtcatgtccccggtttcttccgtcttgtgccatccaatcttgggggactctttcttcgttaccttgtagcggcggttgttttccacatccaacgggtggaacggttttgtagatatagccataatattatgttccgtatcgtttactactgaatattcagttcatggaaaccttgaaagatttctcgctccttatcaacacgtttaacgtgtaatccaaccctcattcggaacgtgaaggaaaaggttaaaacggcacgacaatcaagtggaaaacaaaggatttgaaaagggcacaagaaacacaatcattgattatcaatagttacatttcaaattttcttcattcgggacgaagagaccgctggttcgaatcctgtcctttcgattattttctaacaacctcttccggacggttattttattttccggtaaaatcacttcccctgcaaaagccagtcagaaacccactagcagctgattcttctatctgaaaaaagcccctgctgggatactttatcagtcatccgtcaaattcccattgccccgcgcatgtttctttctctaaaatacaggtaatgagtgaatacttcctgaaacttcccggcgattcccagccgagagcctattccgaatacgaagtccgtgaatttctgggacagggcgtgatcgactcaaaaacgcttacctggaaacagggcatggaaggatggcagcccgtagcccaagttcttcctccgatgtcacctgtatgggaggaaacacaggatcaggagggcaaagatcagccagaagagcagcagtaccgcttgcgttatcctctaaacgggctagccaaattatccattttggcatgtttcgtattgctgcccttcatgctctggagcagctggattgttttttccaacaatgtcgtcaattatgaagaaattcagacactcattcaacagaatatggttcacctgccatcttttgcggtaccattggtcttcttcctcagcatcctgttcattccatccctgcttattcagctgatctggctgtaccgggcatctgccaatattcaggaatttcaagttcagggaattcggttcactccattccttagcgttcttctaagctgtatgccggtagtcggcatggtgctcaatgccctggttcttcaggaaatatataaggcatccaaaaacccggcagaatggatgttgcaaacaccctcccgttccctgcgattatatcttctggtgactacggctctaactctgtgcacccttttccctttcggggcggaacattacgtgacggcctttctgctcaccggcgtactgatgacggcagccagcatcctgtggctggtctgtgtcctgcaaatcaccaaaaaacaggaggaactggtctccaaaaatcaaaactcccgttccggatcgaaaaaaacgtaatcagcgtttttccttttcttccgtgggcggctgactgtctgggaggattttatccaaagcttccatgctgttatccttatacagattctccagcagtttttcccaccccgccgccatctgaacctgtttcaaggcaataataggatcaggcatcatcatttccgggtcgggagcatattgctttagcacctcatccggattgattctgttaaacgttgtcttcccatagcccggcattcccgcctcatgagcgatggattcaatcatctcaaaatgcaaatgcgccaaataattgccgtgcgcagttccgactgagccgatttgctctccgcgtcccaccagagtccccagcggaatatcgctgacggttttcaaatgggcatacagactctgcacaaaacgcccgtccggcaagcggtgcagcagcacgacaacattgccccaatctggagaaggttctcctgcataaatcaacaatccgcggtaggcggcccgcacgggcagtccctcatccgtgttttctcctcctattccatttaaatcctgtcctgcatgccttcccttacgggcggcattcatatcccccacaccctgggcaacataggtaaacgctccattctcatctccgaggggcgatgtaaacacatcggccagaggcgcctttgccagctcctggggcgtcaacaaaaccatccggtaatctacaggaaccggagcagaccgcggaatgtcttcgtcataaatattatggtgcatcccggcctccggaacggcggcatatttcgtcttgtaccaggcaaatgccgtaatcaagacacaggctgttcccaaaagccccataatgacgcgggatgtcgtcttatctatcatcgtgccgactctatacccacggaaccggatttacaatcacaagatagtcaggccagcgtctgcggaaatttttccatccacaatttgcgcgccgcacggatatcttctgaggaaacacggctggagagctcccatacgagcggaactccatgcggaaaaaaaggaagaaggcgttcaaagggaactactcctcccagcaggggaacctgatgatcccgcgcgggccatttgacgtcgttcacatgtcctccaatcaaatgggaggacattcggcgaagaaactgctcatgatttaatataagcaaattatgctttctttgaatatgcccgaaatcatgccagtaaccaataaagggattgtctccaaactccttcatcaacaaattcatttcatcctcactcggcacctgctcataatggctgcgcccttcaatgcccagcttgacgccaaattggcaagcttgcggaaggagctgccggagagcttcacgcgcccgttccagataaacgggagccaggcggttgcggcggcgtacaaattcgcccttggtgcaggcaaacgattccgttcccaccattccctgacgcgccaggttttgcaaacgagccgtatccgtgcgtttcgccaagggttccaccgttcccatatgcaacacgatatatccggcccccagtgctgcgccctgttcaatagactttttcgtcaattcaatagccttggaacgcacctgcagcaaatccgccgtaaaaggcctactgtctggagaatcccccacttcgtcaatcggagcgggaaaaaaattatgcaccccggccacctgcacctttccggcttttaccgccctcatgataccggggagaagggataacttgatgccgtgggaaagttccacatggtcaaaacccaaagaaagaatctcatcaatcatttcttccccgtcctgatgacggtgggaattccagcacgtagaaaataccagcataaaaaaatcaattgttatgagctgatggagccgggttccgtgtagcaatcttccatccactccttgacagcggcagtcatgcttccagcgacatccgcacgaggtttgacgaaagccggaataaaccacggaaatgcgcccaccagatcatgaatcaccacaacatcgccatcacatgtatgggagccggacccaatacccaacgtgggaatggaagaatgtacggtaacttgtcgggccgcatgaggcgttacgccctccacaaccacagcacaagcccccgcctctgccacagcctccacatcccttaccaaggcttcctcctccgcggaggatttccctttgattttatatcctccctcctccagcactttctgcggcaggaggccgatatgacccactacgggaataccggcctccacaatagcacggatatttcctgcctgggctgcccccccttccagcttgacagcatccgctccagccaaaaacaatttctttgcggattgcacggcctgttccaccgtatcataagaatgtatgggcatatctcccactagcagggcgttcttcactccgcgcgcagtagcttccacatgatgaagcatatgatccagcgtcacatgagtggtatccggaaagcccaaaaccaccatccccaaggaatcccctaccagcacaatatctacgccggcctcatccaaaagacggcctgtaggatagtcataagcagtaaccagagtcacatgccgcctgttcttgcaggcgcggattcgttccgctttctcaaaagattgattcatggcgttcaataaacatgcaaatttaccagcgttccgataccaggagcggatcagcctcatccgtatccaattccgccaacaggcaggcaaccgttttatgctggcgcggcaggataagctccggcctgatatcggaaagaggttttaaaacaaatttcctcaaatgggctctgggatgggggagaatcagacgaggaggatcattgaccaccatgtcccccacatagataatatccacatccgccgtgcggggttcacagcgaatcccggaacgaatacgccccagaacccgttctataccctggcaatgcacaagcaattcctccaccgtacctggccaggtaaattccaccacggcattcaaataatcatccgcaccgtgcggacatccctgaggactggtggcatacagggaggattgcaaaaaagggtcatcagacaggctcatctgcaacaaatgatccctggcctgaaccatcaggctgtttttatccccaagattggaccccagtgcaatgcctgctctcttcatcagcaaaaaacatcgtggccgttccggaaaagaagaacggccacgatgccgaaaaagttataattgggacaaccccagaacgtcttccatggtatacagacccggttccctgccttggagccagagagccgcacgaactgctccggaggcaaatgtcatacggctggacgccttatgggtaagttccagccgttcaccatcggaagcaaatattacagtatggtcccccaccacatcccctccccgcagggaatgcatgcctatttccttggcgggtcgaggccctaccaacccttcacggccaaaaaccacactatcttcataattcctgtcaatggcgccggacaggatttccgccagtgtccgggcagtaccggaaggagcatcaattttgtgacggtgatgcatctccattacctctatatcgcagctgcctcccagaatctgagcagccttgcgcgtcagccagaacagggcgttcacccctacggaataattggaagcgaacacaatcggaatggatgccgcagcgtccacgatctcctggcgttccagctccgtatgccccgtagtgccaatcaccagaggtttgttattggcaacagcttccgccagcagagtgctggtgaaagcgtgatgggaaaaatcaatggctacgtcgcatttggcgagggctggataaagctcctgtccctgatcatgagtagaacccacgcaagtatccggattctgcgtcaccgcctcttgaatagcctggcccatgcggcccgaaatgcctgtaacaagaatggaaatcatatcactaaaatgttaaagaatattgaaacgctgaagaagagcggaaagctgagcttccttctcttccgccaatggaaccagcggaagacgtatgccgggctgtatatctcccctcatcgccaaagccgccttgatcggaacaggattggaatccagagtcattagccctttcatcaacggataaaatgtcttctggagggaaagcatttcccccatatcctgattcaggccagctttgacaatggaattcatgatgcccggaaccagattggatgttacggaaaccaatccgctggcaccacaggccataaaaggcaccgtcaggccgtcatcgccacacagaacagtgaaattttccggaaccacctgcatcagctggttcacgcggtccacattgccgtcggcctctttcacacaaacaatatgcgggcaatccttcgccagacggctgattgtttccacactgatttcaataccgcaacgccccggaatgctgtacagcataatcggcagacgggtagcgtccgcaatagccttgaaatgggcataaactccatcctgagaaggtttattgtaataggggcacacctggagcgttccgtctactcccatcttttccgcttcctgggtcatatggatagcttctgcggtggaattagcgcccgttcccgcaataacctgaatacggccagccgcgatctccacggccaattctattaccctcaagtgttcttttacagtcaaggtgggggattctcccgtggtaccgacagccacaatgccggccacgccggcagctatctgcgcttccacaagcattctaaaagcctcttcatcgacccggttgccggcaaacggagtcacaattgctgtataaagaccttgaaacttcataaccttacttggaaatatactatcttaacagacactttttgtcacgacagaatacagaaatatggcacgcctgtcaggcatcctgaaataccattcgtgaacaaatggagcaaaactccaggcaggaattaaacagggacaggaatgattccggccgcctgccgggccgccaggcagctttccttccattgaccacgatatattcccggtgaatatggcgaccttcgttcccacataaaaacaacgcagccgcacaggcggaagaagccaatcgagactgggaaacataccgaaataccggacggtgaattacaatctggctcattctgacatctctccggttcaggcaattttccaagcccgcgatatcttccacccatactcccttttttccagaacgggaaaccatattcacaatcatggccccagaaacaaaggcatgttccagcaaaacggacagacggacacgggaagaacaactcagtccctgcacctcgactgaggcatcttcacaaataatcaaataatcaacacgtccataaagagtatgtaccagaccagcaaaagaagccaaatcggaagaatggttcaggcggcctgacatgaccaggtggctgctgcccggaagacaatcaacgatatggcaagattcttcaccggcctcatgaagcatggcaaccacagttccctgacaggcaaatgccttggctgccaaatatcctatattgccggcgttgcccagaatgacgaccacaggtttctgaatgacttgggatttcatatgccgccattctgacgaaagagtgtaatccgtcaataccccacacatacttaagtcattaagaaagaaaaaggaatagttaagaaaaaattatatggccacgacatcttacaagaaggaaactaactaagagaatgtagggggggggagaacgggaccgagcaagaaaagaacaggccccgcgagtcaaatgactggcggggcctgatggaaaaaaatcccggcggcgacctactcttgcgggacctatcgtccgactaccattggcgcggcagcgtttcacttccgggttcggaacgggaccgggtgggaccactgcgctctggccaccgggcttcagggggaagaggtgattttttcttcatcctgcctgcccgggagccctgcttttttgggggcttctgagtgagggatttttttcagggtatgtgtgtggcggctaagaagatttccgtcctttgtgtggggagggattcagcgtaaactgacatctgcgtggctggtggttgatgaacatgcacaggtaaatgagacaagagcaagttgtcattcacgacggggagtgatgtaatatgatgaagtcaattggtaattagtatcgctcggctcaatacattgctgcacttacacctgcgacctatcaacgtggtggtcttccacgaacctgtagggaaaactcatcttgggaagggcttggcgcttagatgctttcagcgcttatcccgtccgcacttagctactcggccatgcacttgacagtacaaccgatgcaccagtggtgcgtcagacccggtcctctcgtactaaggtctgaacccctcaattttccaacgcccacagaggatagaggaccgaactgtctcgcgacgttctgaacccagctcgcgtgccgctttaaccggcgaacagccggacccttgggaccttctccagccccaggatgcgacgagccgacatcgaggtgccaaaccacgccgtcgatatgaactcttgggcgtgatcagcctgttatccctaaggtaccttttatccgttgagcgacggcaattccactttctaccgccggatcacttgggcctgctttcgcatctgctcgacttgttggtctcacagttaggcgggcttatgcccatgcactcgacacccggttgccaaccgggctgagcccaccttcgcgctcctccgttactctttgggaggataccgccccagtaaaactgaccggctgacacggtcctctggccggattcacggctcagggttagatcctccagtttcaaagggtggtgtctcattgatgactcggacgccccctaaagggcgtcttcagcgtctcccacttactctgagcattaaaaccgaagaaacaatgacagcttacagttaaggtctatagggtctttccgtccttctgcgggtaggcggcatcttcaccgccactacaatttcactgagcgcctggttgagacagtgcccaactcgtttcacgattcgtgcaggtcggaacttacccgacaaggaatttcgctaccttaggaccgttatagttacggccgacattcaccgggacttgggtttagagcttcgccttgcggctaaccccttgccttaatctttcggcattggtcacgtgtcacaccctatacttcgacttgcgtctttgcagagtgctgtgtttttgataaacagtcggttgggccatttctctgcggcctgcatcgctgcaggcaccccttcttccgaagttacggggctaatttgccgagttccttaaccaggtttcactcttacgccttggtatattctacccacccacctgtgtcggtttgcggtacgggtcgcttagcatacgctggggcttttcttggcactcgatccaatgatgcgctgagtccgtggactcaactcggaattcaataacctagtcatcttttctcatgcgtccccccagtttaagggttgcgagctcaggattattaacctgatgtccatcgcctacgcctctcggcctcggcttaggtcccggctaacccagggacgaaacacgttgccctggaaacctcgggtttacggcggccggggatttcacccggcttaacgttactcatgtctgcatactcacttgcatgtgctccagggtcagtcgccatcgcccttcgacgcgcatgcaacgctcttctaccactctgccttgcggcaaagtccagagcttcggtataacgcttgatcgccaatcattttcggcgcaggatcactcgatgagtaagctattacgcattttttaaatggtggctgcttctaagccaacatcctcactgtctgtgtaatcccacatcctttccactgagcgttatttaggcaccttagctgctggtctgggttgtttccctctcgacaatgaagcttatcccccactgtctcactgccacgttccattgcacggtattcggagtttgataaggtttggtaagcgggtgtgccccctagccttgtcagtgctctacccccgcgcatcagcacgtgacgctgcacctaaatgcatttcgaagagaaccagctatcacggggtttgattagcctttcactcctaccctcagctcatcagagaacttttcaacgttcacctgttcggtcctccacatggttttacccatgcttcaacctggccaagggtaggtcacctccgcttcgggtccagtacctgcgacttattgcgccctgttcggacttgctttcgctgcgactccgggccggaagcccttagtcttgccacaaacactgactcgcagactcattaaacaaaaggcacgccatcgcagattgctctgctctgacactttgtagacatacggtttcaggttctatttcactccgctcacagcggttcttttcacctttccctcgcggtacttgttcactatcggtcgccaactagtatttagccttgcgcggtggtccgcgcgggttcatacatcgttccacgtgtgatgtattactcaggataccactaattcccactctggatttcgtctacagggctttcaccttctccggccagcctttccaggctgttctactatccagtatggtcgaatatgacgtggtcctacaaccccgaaggaataccttcggtttgggctccatccgctttcgctcgccactacttacggaatcgatttctctttcttttcctccgcttactgagatgtttcacttcagcgggtttcgcgtttcataccctatgtattcaggtatgaacgatcgagtattgcctcgatcaggttaccccattcggatatccccggatcatcgcttgcttgcagcttcccgaggcttttcgcagcttgccgcgtccttcttcgcctgttggcaccaaggcattcaccgtacgcccttacttacttcatcatattgcaaaagctgttaccacttccacaataccacaaagccctttcgtgacttactgtattgtctcattgcttggtatgcatgtttatcttgtgttttgtagttgttgttcaactacccactttgttggaaagcgattgcttctcagcaatcgttttctttgccacgcagatgtcaattttcgctttccctcaataatcgattttgctggtgggcctgacaggacttgaacctgtgaccccgcgcttatcaagcgcgtgctctaaccaactgagctacaggcccggctttgggtctctttcccgaaactggtggaggcacggggactcgaaccccggacatccagcttgcaaagctggcgctctaccaactgagctatacccccagttgcggttctcggtgaaaaaaggtcgtcacgcacgtcgtgccaggtttcgctctaggcgtctggctgtttacacatctttggttcgttgcgggccctcgcgggttccgctttctctcccctcgggaagagatccgacctgtgcacttccgtgcacttgctccatagaaaggaggtgatccagccgcaggttcccctacggctaccttgttacgacttcatcccagttaccagtctcaccttaggaccctgcctccttgcggttggcttcagatacttcgggtgcgaccggcttccatgatgtgacgggcggtgtgtacaagacccgggaacgtattcacggcgccgtagctgatgcgccattactagcgattccggcttcgtgtaggcgggttgcagcctacagtccgaactgggcccagtttttaggatttcctccgcctcgcggcttcggccccctctgtactgggcattgtagtacgtgtgcagccctgggcataagggccatactgacctgacgtcgtccccaccttcctcccagttgatctgggcagtctcgccagagtccccaccttcacgtgctggtaactggcaacaggggttgcgctcgttgctggacttaaccaaacatctcacgacacgagctgacgacggccatgcagcacctgtgtaacgcctccgaagagtcgcatgctttcacatgttgttcattacatgtcaagcccaggtaaggttcttcgcgttgcatcgaattaagccacatactccaccgcttgtgcgggtccccgtcaatttctttgagttttaatcttgcgaccgtactccccaggcggcacgcttaacgcgttagctccggcacgcagggggtcgattccccgcacaccaagcgtgcaccgtttactgccaggactacaggggtatctaatccctttcgctcccctggccttcgtgcctcagcgtcagttaatgtccaggaacccgccttcgccacgagtgttcctctcgatatctacgcatttcactgctacaccgagaattccggttccccctccattactctagtctcgcagtatcatgtgccgtccgcgggttgagcccgcgcctttcacacacgacttacgaaacagcctacgcacgctttacgcccagtgattccgaacaacgcttgagacctctgtattaccgcggctgctggcacagagttagccgtctcttcctcttgtggtactatctttttaatttgctcccacatgacaggggtttacaatccgaagaccttcattcccccacgcggcgtcgcaccatcagggtttcccccattgtgaatgattctcgactgctgccacccgtaggtgtctggaccgtgtctcagttccagtgtggccggacatcctctcagaccggctacccgtcatcgccttggtgagccgttacctcaccaactaactaataggccgcgagcccatccccaagcgcattgctgctttaatctttcgatactatgcggtattaatcccagtttcccagggctatcccgctctcgggggcaggttactcacgtgttactcacccgtgcgccactagagaattattagcaagctagcaattctctcgttcgacttgcatgtcttatccacgccgccagcgttcgttctgagccagaatcaaactctccatcaaattaatttttgaaattgctggaccaaatggaatcttgcgatttcatttgcgccatgcttcagccagctcttccttcaagttgtgtctcttgaagacctcttcgctctgcctcgcacggcgcgcgtcacgaccttttttctttccccttgcttctaccaaaccacccctctcagagctaggtcgctccttcgggcttttacccctcagacacctctcggcaccctcggaaaaccctcggcggtttcggtagtcattcccttgaaatcttcttatcgcaaccccttccggggttttctccgggtggctggctccagccgcttccagcactcttccgagcccttcagccgccgggcttttcatcccgtcgccgtgttggcgtgccgagaaatctatcataccacacctttttgtcaatttttttcgtgctgttttttgcgatttgttgagatcaaaaacaaaacatatctgattatcaacgtattacatttttatttttttctaataaaaaagcctctttcaccacgaaagaggcctaaacgtttcagaagtcctaagtttctctctactttttgcctcctccactctttttcttcatgactgcgtattgatgaaccagaggcagttcccggagggcgtttgcagcatccttccttgcctggtcataatcttttttctccattgccatattcatcatcacttcatagcaggcggcattgtatccgccatcatccctcgtattagaatccctcataatctggagagcgcgccgagccgccttatagctgtatttacgcatttcctccgagccgttaaggattttcaggatataggaagcaagcgaatcttcccgggggaaacgctccaagacgtggtcaaagatatcaaccattttccgataatttttctccttccaagccttttccgcccgcacttccgccacagtagacgcaaaccatccgttatcggaaaactgccctgcattttcctcaatcaacttctggtattcatcaaatttcttttcccgcctcaattcaaaggatttttttatgacagcatacatggcctgctggcgggccttccgtttcgcatcttcttccgcaaacctgtttttgtcaaaagagtccaatctggcagtttccgccacccattcgggcatcttcttaatttctccagcccacagcaatgttccgtcacgaacgacgaccgcggcgggaaatgagtcaagtttgagcaaatcacaaaattcaatgaccgaacgatccgatggaataccgacaggataaggagtccatccttccggcccggataaatagtcccgcatctgtttttccgccgacggattgagccccaataccacggcttttactcccggatggtctaagagcccgtgttttttaagaacggcatcaagagctcttccaggagctgtttctccaagtatattattgtggcctctccagaagctgatgaatacggttttgccgacaggaagtcctgttagaccgggatgattgaaccattttaatttgctgaacaggggagtgtactgtttgtcttcctgcactactcccatttcctgcatcttcctcggaggttccggttttatttcagcaaccgcctgatttacaagattctgaaaggattccttattgcctgaaagctgctgcaacttcgtccaggctttgctgatggacgttaaggaaagcgccttttccatatcctgcaacgcttcttccatatttccctgccgttccctaagttccgccatcagtttccatggcaaggaagcttccttgttattccttctggagatttcaatacaacggttcagacatctttccaccagggcggcatccatttttccggcaggcacggattttccatttagaagcgttcccgccacatcaatctgtacacggtaattgtccggatactctttgcacaggtcatccagtacggcctgtgcttcctggaatttttccaattccgccaagactctgaatggaactattttcagttgaatgatctgatcctgctgaaactgtcccgaatcctgaatttgccttaaaaaggcctgcgcttccccctttcctcccttccgggcaagctctcccgttctctcagaaacctggcggtagagcttccatgcacgggcgtttgcgccgggattatcccccggaagagatgctgcagaaaaatcaggcttcaacatggcccgcatcatttcttcagaaagttttccaggatgccctctccaaataagcttgccgtttttaacggcaaaagcatgggggatgccgttaacccccattggagacagccatttatccctggtttttttcccatccacatccacggccatggcataagtaaggggcgatggacggtttcttaaaaattctttcagagattccggagatttcctgtccatgacgttaactccgataacctgcatatgaggattattcttaaatgcctgatgcaattgttccatatggggcatagcagccaggcaagggccacaccaggtagcccaaaattcaaaaatgtacactttgtccttttcccattcctttaccggagttccctgtatccatacatccggcaaaccatccagagcaagtgatggaagggcatcctccgaagcaaccgttttgttttcgtttttctcagaagaagctgcgtgcaatggcattccggcagacaccgcaaagatcatggaacaccctaaaaccaacagagaggaatttaacatggtaacacggtactatcgtaaccttctgcgtcaagccaatagaaaaagaaaaggaaagatagaagagccgttatcgtgttctttccaccagaatagaatacaaaataatcccaaaaagaaaagatattaatcatggagtttttcatatggaataagaaaacaaacacgctcagcatccacacttttttgagtttcattggatttaggaaaaatgatttacctttttggatacacaaagacaatattattttctaaaatagaaaatataccagaaatggcttgccagatttttctgaatgcgaaaaatgcgctcatggatgaaatgaagtccagtatcagaaagtttctcgctcttacgaaaatgacccgggacgaatttgccgacctttgcggcgtcagcaaaagtcaggtcgataaatggctttccactgttccaattccccgtgccagacaacgccttatcatcagaatcatgaaggaagagtacgccaaacaggcacgcctggctcaaacaaaaaatccgaacagcatccacgttcccgttactcctcaaaagtatgaaaagttcaggaatgaagctgaacgccatggcctgaccgttccggaatgggcgagtgaagcactggatgctctttccagcatcaaaagcagaagctgaaaagaggatccgatattccggatcgattccagagaaagagaaaatagtgttgttatcgcctcttccctatcttttctttcattataaatctgcacaaattcatgtctgacgacgatatacgcattttggtgaaggagtggctacaaagccaaaaccgcaagtcctatcaattggcggaggagataggcatccggccgcaaactttttacgcacagatgagcgttcgtaaaatatcggccaataccaaaaaagcgctttcccgcatcattccaggcctggtttccgattcagatctgaatccaccttccaatacggaagaatgtgacccgaaaaaactcagaatcaaggaatggctccgggctcacggcaaaacacgccgatggcttgcggaacaatgccgcgtttccgtccgcaccgtacatacctggtttactgcacgcggtaacattcctgtcacccaatatctctttatcgataagctgatgagtgaaggcgagtcgtggaaagttcagcttcccaataccattcccgtgaattttccggaaacggaaatggaaattgttcacaaattccagaaactacatccggacatagatcttcccatgtacggcatgcataaaatcctggagttatgcgttaatgtactcactcaggatgaatattcaaagacgtctccatactcccgtattaccaataccggagagattcgccaccgccggataaaataagaattattcaaaagttcaaatttttcttttccacgggagcatttctgaaaatgcactgtttgcatacccatgccggtatttttctaaaacatcgcaggttctccgccagcctggccttccgggccattcttcttaatctttcacggaaccctttcatttttttgttccttttatcacgacggccacagactatcctatctctcaacacagagaaaaaatcttcagccacattacatcatccctccagtttcaaaaatcaatcactattgattggaaaaacagtccgaaccatgcgtaatagtgcttctatgcagcctgttcaccagagttaaccatacttaccttgcctctccatttttaagaaagcaggcttttggtgaaaaagctcttatcacatgaaaaaccccgtattcttaaaaagaatacggggttaaaaaatggcacgtccaactggattcgaaccagtgacccactgcttagaaggcagttgctctatccaactgagctatggacgcatgatgcggcaaaagagtaacagagttcatctcaacttggcaagcccggatctttgaaaagcgcgctttaagcgccggagcagcggtcatgcgtaaaaggtatgtccaccagggtcgctccaaacttccgcaccagaggctcctgacaggaaaacatgcgttcccgttcctccggttccgtatctatatatccgtgcagatgcagaagaccatgcaccatgtaccggaaaagttctctgaaaacaggttctccgaattccgaagcctgccggatagcggtatcaaagctgacgatgatctctcctattccgtctccatgcggaaaagtaatgacatccgtcgccgtcggatcattcaaaaaacgggcatgcacatcccggatgacgtcatcggaaaccacgctgatttctacttcatccaattcggaaagtacggggacaggaccttcaggcaacgccaacacggacggaagacaactctccaaggctccaatcagggcatccgtaacggatgaactgagcctcccctcccccaaatgattgtagagttcaagattcggtttcattttcctccgcatccgctccgttcttcatctccgtttccgtggattttccctcttgaagggttccggcatcgggcaactccatgatttcaggaacggctttgccttcaccttcctttttcaccgctttctcttctttttccctgacggacacatcagagaaagcatttttctcaatttttgcctccggattgtgagaaggataggcaatgcggttgtggtggatgcttttcagcgtcttaatgaaactgttgcgaatctttttgagatctccgaaggtaaggccgcaatcgtccaaatggccgtccaccacccgttgcttcaaaagttcatccacccttttctgcatttcctcacaggaaattttacccatggagcgcgtggcgctttccacgatgtccgccaggctgacgattcccgtttccttgctctgcgggttgggccccttgtaacggaagttggattccaccacctccgggacgtcatccggagacgccaggccgctttccacgcggctcagaatctcatcacggtattgaagggctttccggtaaaagaagtaagccagtgacgtgccgtgatgctgctctataacgtccaccaaaggacgcggaaggttgttctccctggccaatgccaccccgtcctgaacgtggtcgatgatgatacgggcgctcatgctgggcgtcagctcatcatggggattggggccgtccatgatattttcaatgaaataaagggggttttgcatcttgccaatgtcatggtagtaggcctccacccggcattcaatgggattggccccaatggcttccgccgcagcttccgccagctgggcaaccatcaggcaatggtgaaaggttcccggagcttccatttgcagccttttcatgagagggcggttcatatccgccatttccagccaggaaatgggcgtaatgattttaaaagctccttctatgataggcaggacaccgctgatcagcacgctggtcagcatgcttacgccaaaagccacggccaggcaaaccagaactccagtaaggttgtagtcccatgcctggagattgatgacacccatgatgcaacacagcaccatgacaagcagccccacaaagaagcccgctcgcagcaactgagcacgattccgcaggttatgggtaagcaacacggtaagcatgccggagagagagctcagaatccagaattggacctgcttttccggagcatattgctccggcagaatgaaaaatccgccaagcatgcagatggaaatagtggcaaacatgcccagaagaggtcccagcagcaccgtgacaaccaacggagccatcatatagggaaggtacaaaagttcattgcctatgtcggaagtaatgtcagccgttacatgccggatgagaccaaaaaacaggagctggaccagaaccgccccccacgtgacgacaaaggttttgtttttcctgcgcagggaaccggcgcataaccagtacataggcatcagcgccagcgtcacggaaaaaagcagaaaagcttccgacacatgatgccatatggattttccccagtggggactgtaactgcccatccattgaagcacgatgaaaaccagcacgcacaacccgacggataccgccaggctggaatccaaacggtcaccggctgaacgggacacggaggcagccccttccggggaggcactttcttttgccgctgcggcggcatgctttttcagaaaatgaaacatgataattatttggggtacacttcggcaacctccggaatagtgcccagccgggccatctcctcttctatgagggggttgacgccctgctgcaccatttccatggaaactctcagggcattgcgaatggctacaggggtagaactaccatgcgcaatgatggtcacgcccctgacgcccagaagagggcttccccctacggagtccgcagaaaggcgcgctttcatggcacggaatgctccggaggcgcaggcagctccaaccatacggaacgggtttgccttaagttcctctttcagccatttgctgaaagccttggcggtagcctcgcatgttttcaacaggacgtttccggtaaaaccgtctgtcagagccacatctatttcatgttcaaaaagatcgtggccttccacatttcctacgaatttaaaagggagcgcaccgcgctcctccaaatgcttcaacagacaaaaagttcccttggtaaaatctgttcccttttcatcttcagagccattgctcataactcccaccttaggcatctgtttgccgtaaacagaacgcgccagaatgctggccataacggcataccctaccaaatgccggggcttggcatccgggttggctccggtatcagtcacattgcagactccgaattcattcggaagctgggtcacaatgcccgcacgttccacaccatccagcaacctcagtttgacggtggcagccgctacagccgcccccgtattgcccgcgctgaccacggcatccgcatctccggacttgaccagatccacggaaatggacatggatgaattttttttctttctcaccgccagcaatccggattcattcatttccacaacttccgcagccggaacgatctccacgcgcgggccggaaagcccccagcggtcacaagagctgcgcaccgtttcttcccttcccacaagataaattttttcaatgagaggaaaatcctgcagggcccgcttcgccccgtccacgttaatatcgggcgcgttgtcgccgcccatcacatccagtgcaatcttcatattatctgttgaagaaatgtgttagcagaaaaaacagtccgcttcaagcaagttcagccgctttgcgaagcaaaagcggctggaaagtctatatgatagcgccgcaatacggcgataattttcaaggcaaatgcggcgcccgcggaacttacgcttccgctttcaccacaatttccttgccggaacgggtcgtgtacgtaccgcaattggggcaggcggtatggccgggggtgctgctgccgcaattttggcacttgcggagcttcggcgcgcgccatgcctgagcggcaaggcgggtacgctgcttcatcttggacgttctgcgcttaggtgctgccataattttagttggtaaaaaggtgattaatgatgatctcccagttcattgagggcgtcccacacgccgctattcctgatcggggcagaactgtttacacccgttccctcctctttgtccactccaaaatacggagttttcgccatacagtcgttttccatgcctccgtcagcacacttcgggtatgccggaaaatccagaactatttcttccctcaaggaatctgaaacatccacaacattctgtgaatcaatctggaaagaagccgcgaaatcacaaacttccaccacgtagtcaaagtagcccaggcaacgcacacagcggaatttaaagggggcggaaatattgcctcttacaaacaattcattttcaaatctctgcacatgcagatcaaaagcaagaggcccaatggaagtaacctcttcatcatcaatgccgaaaatttcagaatccagttcaccgctgtattttttccctgcctccggcaagttctccagttctaccagcaatcttttcatgagtatatcttacaggcatacttaatgcctgacaagcaggcagggcggcaccattcatggaaaatgacacatccgtccctctttcaggcaatgcccgaattcgctccggcctaaccgggaggccattccagcttgcggcctgccaacagatgcatgtgcaaatgggggacagcttccccggcgtcatgcccattgttgatgaccaggcgaaagccaccttcatccagatgaagagtccgggcaatccgcccgactgccagcatcatgtgtcccagaagggaggcatcttcctccccggcctcggaaaggcggggaatgggcttgcgcggaacaagcagcaaatgttccggtgcttgtggactaatgtcccggaagcaaacacacaggtcatcctgatatacgatgtccgcggggatttcccctgaacagattttttcaaataacgtagcggccataaaatcaaaaaggaatctgcaatgactttaacatgttttgcaaaccgtgggcaagttattccctggctgaagcgcgtcgcaggcgatccataatagcgcggcccaggccggattccggaacggattccgccacaatgacgtcaatagcttcattttcatccatctgtctcatcagggcaaacaggcgcacggcagcttctgccagccgcccgctgccgggactcatggctaccacttccgcccagtccccttcccgggcaagagcggacgttccttcataggaaagcaagccgtacttcaccccctccaccggggcaaaattttcccccggttccagcagcagcataggtttgcgcggggcgtaatggctggtgagctgccccggcgcatccgccggagattcttccgaaacaggacggcaggaaggcttgcggcgcaccaccttgaccaggttgcgaaattgttcccgggtcaccggcccctcacgcagcaattccagagagggcttgcccttctcgtcaagcacagggcgcacaatcgtgctttccagcccctcggaacaggctccggcatccagaatcatttcaatactgccccccaattccttctgtacggcagaggcggaagtagggctgatatggccgaagcggttggcgctgggcgcagctataggacgccccagcgctttcgccaccccccgcatggcaggatgagcgcttacgcgaacggccaccgtaggaaggccgctggttacaatatccggaatgatatccgcctttggcaacaccaaggtcagcggccccggccagaatctggaggcaagcgtatgcaccagatctttcagcccctccggaacggcggtatatttttccacctcactcccatgatgcacatgaataatcagcggatcaaaagaaggccttcccttggcttcaaaaatccttgctaccgcttccgggttcaaggcatccgcccccaggccgtatacagtctccgtgggaatccctaccagcgcgcccgcacccagagcttccgccgcacgggcatacagtttgcggttgtctgacaggggatctacctcgaacaattctgtttgcatggctttatccttgcctgaagaagctcctgcgtcaagcaagacctccttcccctgaaaggagaaaacagacaaatgaataagagcacgtcctgcggcctcatacttcccctctctttttccaactgcctttacttcactccacccttacgtacttccccgagtgaaagctggcgcaggaaaaggccattccgctaaaaagttgttttctcacgctaccggattgagtacaatcaagccatgaatagggctgcatcaacatccttgccaaacatcatcctgatcgggctgatgggatgcggcaaaactaccatcggaaaggaactgcaccgggaaacgaaccttggttttacggatacggaccagttaattgaacgccagacgggaatgcacattccgcagattttcaaaattcatggggaatcacattttcgagacctggaaaccggaatcctgcaacagcttcagatggccgccacacaaagccgcattatttccacaggaggaggcatcattatcagaccggaaaaccggctgctactgaaaaaactgggcttcgtcgtctggctccatacagacgtaaacatcctgtaccagcgtatttccagatgcaccaaccgccccctgctccaacaacccaatcccaaggccgtgctggaacatctcatgaatgaacggcatgatttttaccaggaaacggcgcacttgaccattgatacggccaatctccacatccatgaaatcgcattcggcattctggaatccgccagagtattccggtcccgacggcaataatgccgacccgtttttccgtgagcgggaaattttctctttctgattcatcctaacgcaagcgcttccggggaagccctttttcccgctccacgcacaagaaacaacaaaaggcgatccccattaaaggaacgccttcaggaaaataataatgcaccggaaaaggcttaagccttacgggccttacggatcattgaattcaccgtttcagagggctgtgctccgttggcaagccatttgtcaaccttttccagattgatggtatagttgacaccttccttcatggggtcataggagcccacttgctcaatgtaacggccgtcacgacgcgcgcggctgtcgacaacgacgattttgtagtaaggacggtccttggaaccctgacggttgagtctgattgctactgccatatcaattataaataaaaggtgttaatggaaaacttgcgcgccttgccactcacatgcgtgcgcattcggctttccacagcgggtgcagatgtatgcgatataatggagtcattgtcaataccagagttatttttacaggaaaaaagcctctcctccatttctgcatcaggaaaaattttccaccgccatgcggccaaaagaatacagcatgctgaatccgaaccccgccagcacaagggacaatattccatccagtattccggcataccgtccgtaaaaggaacgaatgggctgccagcggaaaacaagagcccacaaaatccagcccgccgttcccgtcgccacgattaaaaaacagataaaaagagcataggaaggatcatgatttttttccaacagcggagcggaaagagccacaaagaaaaacgtggccttgggattcatcaggttagtcaccagagcatcacggtaaatacaggaagccggggaaatatccccgcacccggcaaggaaagcattcctccccctcggccatattttctatgccaaatacagcatccagcaggaagcggcgcaaaacagccccacccccaggaaactgtgaaaaacggatgctcctactgtacaagccagtgcagcatgggcaactattccggtaccaatgcccaaagcagccatcactcccgcgccaaagccgtaagccagcgtgctccgggtaacaaaagcctggtcgggccccggagatgcctgggaaagaagcagaatacctgcgaacataagttcttccttcatgaaacaaaaaaacccttatgccctgggatgcgcctgtctgtaaacttccgccattctggcacgcgtcacatgcgtgtaaatctgggtagtggataaggaagcatggcccagcagttcctggacggaacggagatccgcccctgcctccagaatgtgcgtggcgaatgtatgcctgatcttatggggagaaatggtaaaaggaatggaagacatcttcacatatttgttcagcatcatctgcacggagcgagcgcttaaccgggttcctatacgggagacaaacaagggggaattcttcggcagacaggccatggaaacataagtttccagagcagccagagcaggagttcccacaggcaggatgcgctccttgcgccccttccccattaccttcacgccccggaaacggtggtccacactgccgacatccagccctactaattcactcaggcgcatcccgcaggaataaaaaagttccaatatggcggcatcacggtagggaagccatgcgggagcattggcggaaacggccgtcttgtagggaagctccaacaattccaacatctggttgagtgtcaagaaaacgggaagcgttttttttcttctgggaagggaaacgcccgtcatcggattcgtctccagcccgtgcctccgcatcatgaaacggtaaaaactgcgcagggcggcaaacctcagccggatggaagacgtggcggcttcatccttcagctcctggaaaagccagtccctcatctggtccggcgtacaattctcccaccctggaaatgaatcagccgcccaggccctgaactggcgcaaggcgcgggcgtacacctccaccgtatgaggagaagcctgcttttccacctccagatattgaagaaagtcctgttccggttccagaggaatccccatcatgaagaataaattactccgtacctttatccttgtcatccccggcatctaccggcgactccttcagcagcacttcactaatattggcccggatgaacaaatcaatatcgtccggttcttccatagcatacaaagggctgtctttatggctgtccgccagagcctgctctctctccaccgggctgagcacaccgtcctggtccaaatcgtaaagctccatcatttccttcattttggcctggtacagagccgcggcatctttcatgacaacggcatgttcctccggatcaatgcggccgttcccgttggcatcataattctgcagcaacatgttacgagccagcagaaacaatccaggagcaaccatgaagcgcttccgtcccaccgtgcgaatttccaccatgggcatttccaccccctctgccggagggggcggcggaggaatttccttcctctcggcgggagggtaaaacggaattccatctctcttgtccggcccggcatccggcctgcgcaccccgcgccgtttctctacatgttcccggaaagccctgtactcttccagggaaagccttccgtccccatccttatcaaacttcctcaggaaggtttttctggcctccctccgcgcagagcgggcatcctccaccaaccgggccttgtcctgttcggacaaaattcccgtgcccgtactgtcatagcggtccaaaaccatttggcggatgagcaaagtcacctgaaggcattccagtccgggcctgggggcagtttccattttcccgcggtcgccggaagccacggattgccctgccgcaaacgggaacagaccgaacgccagcgctgcggaacatgacaagataaacatgtggggcaatctcataaccacttttactaaccccgccggaaaaagacggtttcaaaaataaacatccgcccctgctcgcgggcgacacgggcggatgcaggaaacgtacggaaagcggaaaaacttacttctccacttgaacgatcgcgttcttttccaattcaatcaccacgccttccgcaatcttgagagaaacggtgcgctcattcaccttctccacaaaaccgtgcagccctgcgtttgtaatcaccttgtccccgcgctgcagggctgcgatgcgcgcctgctgctccttctgcgccttcctctggggacggatcagcatcacccagaacaggacgatgataatcacaaacatgaacatggggctggcgagaatctgctgaaacatatttgcgggttcctgcccggcggcgccagccgcatcctgagcctgtgctaacataaagatattcataaaatgtcgtttgctttataccgcgcgataaacgaatccttgaaggaaccgaacgtgccggcggctatggcctcgcgcgcctgggccatcagccggagatagaattccagattctgaaaagaaagcaatcttaaagcgagtatttcaccggctttaaacaaatgccgcacgtaagcgcgggaaaattgcgtgacatacggatgtccctccgggtcaattgggcgggaatccgtcgcccagcgctgattcttgatatgcatggggccgtccggagtcagcgccacgccgtggcgagccaggcgggtaggcattacgcagtcaaacatatccacgccgcgggcaatcatttccagcaattgggggggggtgcccagccccatggcgtaccggggcttctcctccggcagccagggagcggaatgatcaatggcgcggagcatttcatcctccggctctcccacggaaacgccgccgatggcgtacccgtcaaaatccatggcggccagttcttccgcgcacttctttcttaaatccgcatacacggaaccctgcacaataccgaaatggtgctgacgcccttccccggaacgggggcgatgttcctgcacccacgccttgcagcggcgggcccaacgaagcgtgtaccccagggaggcttccgcgtacttcctgtcgcagggataaggggggcactcgtcaaacagcatggcgatatcactgcccaagtccgcctggatctccatggaccgctccgggctcagcatcatgtacgccccgtccaaatggttctggaaacgcaccccttcttccgtaattttacggagcttggcaagggaccagacctggaacccgccggaatccgtcaaaatagggcggttccaggaggaaaatttgtgtaatccgcccatttgcctaattaaagcggaaccggggcgcagggacaaatgataggtatttcccagaataatctcagctcccagcatctccaaatcctgcggatgcatggttttcacggaaccctgcgttcccaccggcatgaaaatgggggtgggaacccgtccatgcggcaactcaagcgaccccaggcgcgcagccgtggaggaatctttctgatgaagtataaaaggcatcggaatcagactttctgcaatttgataaagcgggcgcggtaaatcggctttcccatggcctcccattgaagctggaaatccgtacggggataaaaaaattcgtcctcatcccaactggcacggctaaacagaccgctgcgcgccacatggtccagcacccacagaaaatatccttcatgatccgtcttgaacaggaactccccgccatcggacagggaacggtgaagcacgggaagaaaatcctcctgcaccagccggttcttatgatgcctctccttgggccaaggatccggacataaataatgcagccgggaaatgcagccgggctgcatcatccattccagaaagtaacggctttccacgcgaaacaccttcacgttatccaacccgcggacggccgcccgggaacaaaccccccgtacgcggcccaaaagccgttctattcccagaaaacggcgctccggataatgggccgccatctgaagcaggaatcctccgtccccacaccccaaatcaacctcaaacggaccatccgcgccaaaaatatcagaaggcgccagcaccttgaaaaaatcgtctggaataaaggccggatttatcatgggaatcaacgtgcggataagatgcgttacaaaacggactctgtcaaacgagaagaccctctccccgcaagcatggcgggaagaggcccgaaaaaacggaaaaaataagccagaacggcccggaaccgtcagctccggcaataaaggcgattataaattttacggtcaaaacggtaatagcgcgcggcgcggtggggaaccccctcctccttctcatccagcggcacaatgtaggggcgggaagcgatctttttgtggaaattacgcacatccatgggcttgccgtgaatctcctcattcaaccgccggagctgaagagccgtaaacttggcaggcagcatgtcataaatcagcgcaggctccttcttcacggaagaacgcactctctccagcgccaggtcaataatatcccggtgatcaaacgccagttccggcaaatcatctacaggaacccagcgggtcttgtggctttccatcagtttgcgcagcttggtggaaatcctgagcatggccatgtaggccaccgtcaccaggcgtcctatcttctggccggaaacagcctccacccatgccctgtcctccggattcttgatgcgcgatggcgcaccgaaggtatggaactgttccaaatggggggaagacatgccggtcatgtcaaacaaaacgcggcgggcagcggcatccagttcttcctcctcataaatcaaatcgccgggcaatttggaaatggcgccggtatggccaggttcaaattgcgtcttctcaaccagaaggactttcaaaccttcttcatcgaacccgatcaacacacaatccactgagagatgcggataaaatgcctgcctgctcattatgttatctattattgtagtaagttcccagaatcgcatcaacgctacgcaagcgaaccagccaagtcaaccaaaatcaaaatagaaacggcaatgaaaagccggcccgcttggcaccgggaaacatcacgccacttccggaagactgcttttcacgggcggaaaaacgcgcccgcgtcttgcatttcatcatcaccccgtccatataataaaatcatgcagacaggtatcctcaggggaatgtccgtgctggccgggctgctatggctggcatcctgctcgtcctctcccaaaagtcgggattatccgggctacatgacccgcccctataccatccgggggcatcgctaccatcccatgaacgtggaacaggcgctggcgtatgaacaaacgggaattgcctcccattacaatgaatgcgccctttgggggctcgtcagcggaaaaacggcgatcggagaaaacgtgcgcccctggcacctgcacgcagcgcatcccacccttcccctcccgtgcgaagtgctcgttcaatcccttcgaacaggcaaaaccgtaaaagtccgcgtaaacgaccggggccccttcatcaaaaacagaatcatagatcttagtgaagaagccgcagaacggctggacatgaagcaccatgggctggacaaagtcagaatcaccgtcctttccgtaggagacgggaaatggaaaaaagaagcgcccccttgcgccactccggcctgattccctacttcaacacattccgtgtggtcttaaaatgcatcttggccaccttgggcagcatttcttccccatgcagggccaccagctggcgcgcagctttcaccacttggccggaagctcccagcggcaacttcatgccggcgccctctcccgccgcatccatccagttcacaaaacgttcgcgcgccagaatagatgccgcagccacagcaacatcactctccgcccggacacgctgttccagccggacacaaacctttttggcggcaagcgccctcttcagaacaaacggattggcgaactggtcgctcaatgccatgggacaccccggcaccttggccgccagcccctcaatcaccgtagcatgcccccaggcgagaaaacggttcaaattcccgaactccggataaagctggttataccgttccgggccaatgcttaccagatgaaaccggatgcccggcaccctgcggatcccctccgccaggcaacggattctggatgaagaccctaccagcttgctgtcacaaacgcccagcttgcgcaatgcggcgccgatgcccccgtccacataaacgcttaccaccaccagcgggccgaagtaatctccctttccgctctcgtcaatcccgaagtggggaacaaaaccgcctccttcttccatctcttccggctgggccaaaactccggtcacctgcggttccagcgtaaactctataaaatcatccgttccctttccctgcagaagaagcttgttcttcttctcgtaaaccgtcgccagcagggaaggcccggcaaatgaaaaacgcgcatagggaacctctcttctttcaaaccccttttcctcaagaatggactcaagccttccggcctgggcgtcagtcagcatggttgtaaacgtggttcgcatatatccttcccggagccggaacactccggggcaagcaatggaagcatcccaaccattccggtcaagcaaaattcccgcatcacgcggttgaggacgtaaaaatcaagcatgccacggattatgtgattttttaggagacaaatcatgcacgctgaactataaaactcatacattcatatcattctgcactccatatggctaaaacattaacaaaacgagacctcgttaacaaaatcagcgccgaaaccaacttcactcagattgaagtgttcgacatcgtacagcgtgccgtggacattatctccagcacccttgctgaaggcgaccgtgtggtgattcgcaatttcggaaccttccaggtgaaggaagtgaagcccaaagtaggccgcaaccccaaaaatcccgaccaggatgtgccgattccggcccgctccgttgtcaaattcaaggttggcaaggaattgaaggatcaggtcgccaagctgaccgcctccaagtaatccccacagggatcagacagattactccgggcgcctccatcaaacaatggaggcgcctttttgtttgcaatttgcgcggcattcgggaatataagggaacgtgagcatgttccggatacagcaccttcttctgatcaccgtagcagcactttgctcctgtgctacagaacgcacggtagctacaaactttcagccccggcaacgccctgattcggaaaaaacggacgcagagctgatggatgccctggaagcgaaattcgccggcggcttcggccagcagacggacaaggaaggaaacaccaggatggtgtcccaaaaacggagttcctttgaagggctccggtacagcggcaacacgtctcaaatcgaaaaaaaggcttttgaaaccgcatcctttgaaaaaaagaaatttgacggtgcctccacccggtttgaaacgaagaaatgggacggcatcaaatccttcacggacgataaactggaaacaccggacttcatcgcccgcgccaggggagtaaatacccactcctggcaggatgcctccaaacaatacgccacgcagcaatccgactttcatggacgctcctggaaagatgcggacaagcgcctcggccgcactgtcaaccgggacattgaagccaagagacaaagctttggacagccaactatcatgagtgcgcggcaggcccaggcgcatactattcaggaaacgcgggaaatgatgggacgcacggactgatgcgccgatgtttcggacgtgatcccatgccacatttcagattcgacattgttttcagccgccatctataattctgcccgtgagtgccaaagacgttcctccttccatcaccctgcctaccagcgactactataccattgttaaaatgagcaatcatgccgtcgtgggagtattccgccagcatgtctttgcgcgccgcagcacgcgccgttatgcgccccccatccctgaagaacacgactcctattgcgttaaaagaactccggagcgtgtcatggtccaaatctttcatgacggcaacgaagtttaccgttgcatttttgtgccgcctgccgattattgacggcaggacaaccatgaaagctccttttttcagtccggccttctgcctcattacaagcctgattacagcctgctcttctccctccggccccaatgcgtggacgccggtcacttccggtcctccgcgtgcgcccatcccccagaacgaagttctggtcattgacgaataccccatgggggaatacaccaacgtggggcattttaacgggccggaagggcgcattgtccatgtctctatggaagacaaggaactagtcgactacttcaccagggaagctgcggccatggggggcaataccgtcgtcatcagggaaccgcgcatccgctaccgttccggcgaaggcaagagcagccgggtggacgtcatctatgttcgggaagaaatgggaacacacggtgcggaagacctgggcatggactcgctccccattgatgaagaatctctgcggatttattagagccgccggaaacgtcccaggtgccatttcctgcccggagttttttcagctctttttattggccgcaccgcaatgcgggcactccgcacgggaattccccttctccatataaaaccggaatccgcatatccggcactggaacttgcgcctccgctccaggaaagatcgtatccatcccacagccaggcaaacagataccacagcgcaaaaaccgctggcgcccagtaaaaacaggcgcatcaaaaaatcctggagggtcatattcacggctcttcctccttccattcgatggacatggtgccgctccgcggctcccgggatggaacccagcgcaaagaccgggcgaacctcattgcagactcatccgctccattacttccggaagactccagcaacaaaacttgagaaggaacgccccatacatccaccaccacaaaaaaatcactcctcagccccgtgtgatcttcacttctggaaaaaccggacagggagccggctgtaacaatccgtccatccagccccggggaacaaaaagacaaatagggaatgcatgttccggaaatctccaaggaaggattcatcatggcgcgtatatgaaaatccggatgctgccacatacgccagacctgatccgccacagtgggcacggacacgggggggagaggggccagaggcgtatctgcggaacgcggagaaggcaaagtcacgcccatttccccggtcgggccggccgtcaccggatcagcccaaacggggcctctcacaggcagaggagtattgcgcagcacatactgatgcaggcgcggattatctgcaggcagcagcaccacggcacccggctgatctcccctgctgcggatttccggcacctccacatggacaaaaaggctggcggcaaaagcgcaaacgccaaaaaaaagcatccacagaaaaatacgccagcgcaacaggccggtttccctccagtcaaacgtcaatcccaaatgaaggtcgaaaattttatcccggctctttttattcagcttcatgaggtaacaagggaaaaaatcaatccgcgggctcggcggcaatataacacgtcatccccttggcaagcaccatatccaccagctgctgttccagggcccgtgaaacggaatcatccaaacgcagggcaatccccatacggctcccattctccccatgctcccgggaaatccggtccaattctgaggaaacgccgggcagcccgccttcaatcaggcggtttccgatataaaaagcgggctggtcgccagccgtaactgaaataaactcaacatcccccacaatattcatcagaaaatgggaagaaggagcctttacctcatacccatacgccattcccacacgggaagtcatgatcgtcagcacgcagacaagaacaaccaaatccagcaggacgaccacctgaatgaaaaacgccccggcgggcaatgttgaacgggtcttgatctgcatgcctttcctccttccctgttgcactcacacgccccggccattcatgctctctccggcctcgcgcctctgccgggcatcacacaccaggcaaacggcctccgtgccgacccgttccagggaatgtacaatctggcgggagcgggaggccaggtaggaataaaacaaataagcgggaatagcaatgctcagccccagggcggaactaagcagggcctggtaaacggcatccgacatggcaagagagggagccttcccttccagaacccccggctgggaataaaatcccaccagcccctggatcgtccccagcacgccgactagcgggctcaccgtagccactaccagcaatccgcggatattcttttcaatctgaaacacttccatctgaacggaatcctctgccacagtccgtagttcttcacgcctcaatccggcatgcgccagcacggaagaaaccacgcgggccgcaggtcccggtaaaatggaagcctcatgccgggcttcatccgtctttccggcatttaccagcttggaaatacctcttaaaaaatctccagtattaatttgaatcctgtgaaaatacaaaatccgctccgcgacaaccgccagcgcataaacggccagaacgctcaaaacccagaacaacggacctatcttgatgatcaattcattcataaccctctttctcgcgttagatcatgcacacttcccatgtaaattcaactcaaacctatgtggcccggcagccgagcttctgcagcagccgcgttcccgcccataataagacggaaccaagccacagcaaggaaccgaaactcaggagccataccgcatcaaacaggcacatgccggaaagcagcaccgtcacagccctttgaacccggggcctgcccgcctcacgccgtgctacggcggaaatcacgcaggtaaacaaaaacaggccgaaagcataccacagcaaggccggaggaggaacggactctccacccgaacgggcaaatgccaggccggcggccagcacccacaccccgcggcacaaccccatcaaaacaatggagccgctccacagtttatggaacacattatacagggaaatcacaatcagcagcaaagcccccacggcaaattccccgcccagcgccatgttcagcaccaggccggacaacccggccgccaaagacaacagcctcagtacggaaacgctcaccgcgccgcacggcacggggcggtccggataacgggcggcatcccacctggcgtccacacggtcattctcccacataccatacaaataaaagcacagccccatcagcactacgcccccatacagggcgagaggcggcagctccgccccacggacggaagcccacgccgccgccgcgttggtaaacagcgtgggaatattggccggacgggaggaacggagcactcctctcaataaacggcaatcatgcatcgccgcatactgtacagggaaaaacggcgatgaccaagcacatccacagtcagcaaaagtgcaggaaccggcatcccgcccatgccgggcagcatccatacatacccagaaatagattgtctttgcaggactgtcccctatcatgctggaggcattaaaaatactcttctctccccccatgaatatcaggacccacatccaggcgcttctcatctgtaccatgcccctgtccgcacaggggcaaagcatcgtggattcacgggcctcccttccacgagccgtccagcttcacggggatgaaggcagggaaacggtgcggccagacgaatccaagcgcatctctccgaacgaagcgccggcatcccgtgttcagccccagcggatcgtcaaccggattgccgccacagtcaacggccgtcccatcacggccaatgaggtcagcgtgcgtctcatgcccatcggagcacagctcgcggcccagtatcccaaacaggggcccgaattctacaagcaactggccctggcgaaaaaaaacatcattgaagacctggtggagcgagaactgctccgcaatgaatttgaaggcatgggcggcgtcattagggactctctcattgaccaggaagtcaaccgcaccatcctgaccacctttaacggagatcgttccgccttcctgaaaaacctgagcctctccggcatgaccatccgcgctttccgggaaatgacgaaaaaacagctccaggttcaaatcatgcgggcttccaaatacgaccaggaaataccgcctactccggaggaaatacagcaggaatacgaatctaccaaagaacaataccgggacctgaccaaagacaaaatcaaattcaagaaaatcttcattcccatgctgggggatgactccgcctccacgccggaagtacagctgaacctggcggaactcatcgccaaggaaatcaaatccaaaaacgccacctttgaggaaatggccaaacgctactccaaggatctatatgcggaaaaaggcggtgactggcccgttacggaacgctccacgctctccccggaatccgccgccatcatctttggcgcacagcccggcgaaatcatcggaccgttggtggactccaccggcttcaccatcgtattggtggagaaaaaggaactggcgccgccgccccccctctccgccatcaaggagcagattgacatcatggcgcgcaacaagcgcagcaatgaacgttataaaaaatgggtggaacgcctccggaaaaaagccatcgtcaaaatatacatctgattcttctcctttccccattgccggaccggcccattcaacaaggccggtccggcgttctctctttcattccccctgtttttctttccgccaaccgttccgtccgctctccttctcctgccgggggcatcttcctctcgcccatatctctggaagacgccttcatacataactggacggcggccgcaagtcatcccgcctgacgcgtggaaccctgctgacgtaatccgggcagaaaccgtatcctgctgaataaaaatcttgcaagatggcagatttccagtcgtaatatcacagatatgttcaccaatattacacgcacgaccctctgcattactgcgttcagcatcgctagcctcatggcggcgcctctgaatgcaaccaaaacggagagcctggattggaactggaaattcgcccgtttcgggaaaatgccggatggcagtacgcaaccggaaccgggaaaagccatgggattcgccactgccaccagtgaagaatccggcaatccggcggacaatgccgtggacggggacaagtccacccgctggtgtgccgccagtggcaaaagcggagaaaaaatcaccgtggacatgggacgccccgtagatgtaaaaaccgttaacatcctgtgggaaaaacaaagcaaccatcttttcaagctggaaggctccggtgacggaaaacgctgggcaactattgaagacaaaacttccgggcaaaacgactccaaggaagacacggtagaaaacaaaaccggcaaaccgcgatacttccgcatcaccgtcacgggcaacaaccagagcaactgggccagcatccgtgaaatcacctttaaaaacgacaagggggaaattatccgccctcaggccgccgccggaaccagtaaggcggacaatccctccagcccctctttcaacgacaaaaactggcgttccttgaacctgccgcacgactggggcgtggaaggacccttccggatggaaattgaaaacagaaccggaaaactcccctgggtcggcattggctggtaccgcaaaacgctggaaatcccggcggacgccaagggcaaccaattctatctggactttgacggcgttatgtcccgccccaaaatttatgtgaacggacacctggtaagcgaatggaaatacggttacagctccttccgcgtggacatcacgcccttcctgaaattcgggcagcaaaataccattgccgtcagagtggacaatccccccagcacctcccgatggtatccgggcggcggcatctaccgccatgtgtggctcacggaatccaaccctgtgcacatcgaacactggggcgttttcgtcaaaactccggaaatcaccaaatccgccgccaaggtagaagtggacaccacggtgaaaaacaccacggacaaagccgtcatccccactgttactgaagaaatcctggacggaggtaaaatcgtagcctccacaaccaccaaaggggaagaaattcccgccggggaaaagggcaaaatcaccagcacgctgacgctcaaaaaccccactctgtggacgctaaacgctccccatctgtataagatgaaaaccacggtcaggatgggagacaaagtcatcgaccaaaaattcaccaacttcggcgtaagaaccgttgaatggaaacccacgggattctaccttaacggggagcgcgtgcagctcaagggcgtttgccagcaccatgacctgggaccgctcggctccgccgcccacacgcgaggctatgaacgccagattgaaatcctgaaggaattcggcgtcaactccatccgcacgtcccacaacccgcctgcgccggaagtgctggacctgtgcgataaaatgggcatcctggtcattgacgaacttttcgacgtatggcaatgctccaaagaaggcgtcaacaacgaatcctttaacgaatggcatgaacgggacgtggttaacctctgccaccgggaccgaaaccacccctgtgtcattgcatggagttcgggaaatgaagttccggaacagggaatgaaaaatctgcaccatatctcccaaaccctgacggatcttttccaccgggaagaccccacgcgtaaagtgacttccggctgcaacaacgccaatgccgcacgcaacggctttggggacaccctggatgtttacggctacaactacaagccctgggcctacaaggacttcgccaaggaccgcccccaccagccgttttatggtgcggaaaccgcctcctgtgtcagctcccgcggagaatacttcttccccgtggactggaacaagggcaagggattttacctctaccaggtcagttcctatgacctgtacgcccccggctgggccaaccgcccggatgtggaattcgccgctcaggaagacaatcccaacagcgcgggagaatatgtatggacgggctttgactacattggggaacccaccccgtacaatctggacgccaccaacgccctgaacgtgccggaagggccggaacgcgaaaagctgatggcggaactcaaaaaactgggaaaccgcgccccctcccgcagctcctacttcggcatcgtggacctgtgcggcttcaaaaaggaccgcttctacatctaccaggcccactggaggccggatcttaagatggcgcacatcctgccgcactggaactggccggaacgcaaggggcaggtaacgcccgtgcatgtctacaccagcggggatgaagcggaactcttcctgaatgggaaatcccagggcgtccgcaaaaagggcaccggggaaaaggaccgctaccgcctcgtgtgggaagacgtcaaatacacgcccggcaccctcaaagtagtcgccaaaaaggacggtaaaatctgggctacggacacggtaaccactaccggaaaacctgcggcgctcaccctcaagccggaccgcaacgaaatcaagggagacggctatgacctgtcttatgtcaccgtagccgtccgcgacgcccagggccgtatggtgccccgaagcaaaaaccagctcaccttcaaggtaagcggccccgcggacatcgccggcatctgcaacggtgatcctacggacttcaccaccatggcgaatccggaaaacaagaaaatcatgaaaatcaaggccttcaatggccttgcccaggtcattctgcgctcccgcaagggagaatccggaaaagtgacgctccaagtcatctccaacggactcaagctagctcagacaactgtgacggtcaaataaaaaaacaggaaaaactccgttccagccgccgggctccatcaggaacccggcggctttttcatcacattattccggggaaaaagagccatctttccaccctctcccggacaggtagggattgaaagaaaaaaactttatgctacccttttgcccatgtctgatctgcccaaagcatacgatccttccctggtggaagaaaaatggcaatcccgctggattgaagaaggttgtttcaaggctgacccggcttctgaaaagcctgcctactctgtcgtcatccctccccccaacgtcacgggagtgctgcatctgggccatgtgctgaacaacaccatccaggacatcctggtgcgccgcgcgcgccaaaaaggatatgaagccctctggctgcccggaacagaccatgccggaatcgccacgcaggtaagggtggaaaaagacctcaaacagacaacgggccggagccgccacgatctgggccgtgaagccttcctggaaaaagtctgggaatggaaagaaaaacacggaggcatcatcatcaaccagctccataagctgggttgttcctgcgactgggaccgcgaacgcttcacgatggatgaggaatacaccaaagccgttggacaggtcttcattgaactctttaaggaaggactcatctaccggggccgccgcatggtcaactggtgccctgtatccctcacggccctctctgatgaagaagtcatcatgactgagcagaaaagcaagctctacaccgttctttacaaactggaagacgggtccggagccctccatgtagccaccacccgcccggaaaccatcatggcggacgtggctgtggccgtcaacccgaaggatccgcggtacgcccacctcatcgggaaaaacgtcatgcgcccgctcaatcccacccccattcctatcatcggagatgaatatgtagaaatagaattcggcacgggcgctctgaaaatcactccggcccatgataaggccgactttgaaataggccggaaattcaacctggaaattatcgacatccttacccccgacggtcatatcaactgcccggaagtgcccgaactccacggcatggaccgctttgacgcacgccgcaaatccgtggaaatgctggaagcctccggcctcatggtcaacattgaagactatgataacaaagtcgggttctccgaacgcgccaatgtcccgattgaaccgcgcctctccatgcagtggttcctcaaatacccctgcgtgaaagaagccgcggacgccgtagcgggaggggatatcacttttcgccccgcgcgctgggcgaaaacctacgcccactggctggaaaacattcaggactggtgcatctcccgacagctctggtggggccatcgcatcccggtctggtaccgcaaagacaaggcggaagaactcaggaacgccccggcgctggacgcctccgcactggaacagggcttcctctacgtgggaaccgaaccgccccaggacccggacaactggattcaggacaacgacgtaatggacacatggttctcctcctggctgtggcctttctccaccatggatgaggaaacccgcgccaaattctatcccactacggatcttgtcacgggaccggacatcatcttcttctgggtggcgcgcatgattatggccggataccgtttccagcatgacaaaccgttcagcaacgtctttttcacgtctatcatccgtgacaaaatcgggcgtaaaatgagcaaatccctgggcaactccccggatcctctggacctgatcgccaactacggagcggacggcctccgcttcggactcatgcgcatcgcccccacaggaacggacgtgcgctttgatgaaaaccagatcagcgaaggccgcaactttgccaacaagctgtacaatgccacgcgcttccggctgatgcagggagatgccaggggagaaacggcccctcactactcatccgtacatatctccattatctccaagctcaagcaactgcatgcagatgtagaaaaagcgctggcggactacgaattcaacgccctcatccaaaccctgtaccaattcttctggaacgaatactgcgaccgcttcctggaagccgtcaagggtgacctgaaggacggggcggacccagcggcacgggcagccacgctcaccacgatggacacggtgctcaggcactacctggcccttctgcatccggtcatgcctcatatcacggaagaactctgggcctccctgggctttgcggaaagcaacggcggcctgccgctcatgcgcactcctctcccctctgccgaaaacctcctggcaggacttgatgaaagccgcatcaccttggcgaatacccaggccgcagccctttatgaaacggccaacaaggcccgcaacctgaaagcggaatacgacctttccaacaataaaaacgtcagcttcatcctgaaaactccccacgacgtaccccaggatatcctctcccgtctggccattttggcgaacgccaaatccgtcatccgggacgcagcttactcctcccccaagggaacgcctgcggccctcacgccgcttggggaactcttcctgcccctggaaggccttattgacgtggaagcggaaaaggaacgcctgggcagggaactggataaaatagctagggaaatcgccaaatccgcggccaagctgggtaatgcgggctttgtggaaagagctccggcagaagtcgtgaatcaggaaaaaacccgtctggcggactgggaggcaaaacaatcccagttaaaagggatgcttgattccctttcctaaccatctatcattccgggaatgaataatattcaaaagtactttgcttaccgcgagcaattcattgaattgcttgaagcggtgggcatacgtactcttgaacaattcgcttccgcggacccctccaccgttttgcctgaacttcaccaggcaaaacggatgctgaaactgcagacggaaattccttccgctcccgttttcagggaatgggtgaatcaggctctttcttctcctactgcgccggaaccggagcttcttcccatccatgagggcgacggcctcccccttgccactcccgttgaccctccgattactgattcttcagaaaacagaagggaacgtggacgttcccatacggacggacctccaaaacatctctccgccaaggccaggctgcaggaagaacacagctaccagcccgcaaaacatgttcacacccacaaggagccgaaaacctaccttcgcaaaaaaggcatcaagcacatgacctccttccggacatggatgggagccgttatcgtcctgctcctgttcatctgcatcctcttctccatttcggtcaccacccttgtgcttctcaatggagaacgaggctggccgttaatcagcctctgcttcggcccctggattctggcgctggttctctatctttccctggcgcttccccggaaatgcagcgtgtgcagggcccatgtcttttcctttaaaaaatacacccgcaataaggcggcccaccacattcccctgttcggctacgtattcgccacggcactgcatatattcctcttccgctggttccgttgcccggcctgcggttcctcccagcaactgggaaaaccccgtaccgaaccgcacaggcattaacgaagcttaattcctgcgccaggcttcacggtatcccggcctcctgcctcctttcttccccttacctggcattcggaaggcggttcctccatctgtccgtcccttccattatctgcccctattccccgcacttcaaccccacgctctgacgggacaggaagcccctgcccgcttccggatctcatggaacggcttccggcaacgcatccccccttcccggtaacttattctataaagagccaccattaggaaccgcctcaaaaccggctcggaaaaatccggcaagaaggccgtttctccgtctcttccggataaatacgtttcctccttcctccggatatcccagcaactcaaacatgcgttcaacgtcatagaaaagcatatccctgaaaacggcagtccaggaaaacaagcgaacatttcaacaaccggaattcccccctcattaacctattccggatttgccggcctcgtgcgccaggcaagggctgcgctccggcaaccttctccctatatgggaagcacaccgtaatgaaaacttatcagaaaaacggggacaataaaaaacgccatcctccttttcggaggacggcgtccaaaatcctgaggcgtctcggttagagcacttccggagcaagggaaacaatcttcatgaatttcttttcacggagttcacgagcgaccggcccgaaaatacgggtgccgcgcgggttgttgtccttgtcgatgatgacgacggcattgccgtcaaaacgaagcacggaaccgtcatcacggcgaatcggggcggcagtgcgcactaccacggccttcaccacggttcctttcttcacggaagcggtgggaatggattcgcggatatggcaggtaataatatcgccaatgtgagcctgacgggtgcgcttgccgataacgccaatcatcttggcggagcgggcgccggtattgtcggctacctggactagggattccatctggatcatggtatcaaatctcctttacttaatggttgattcctgattaatgggtaagcacttccaccagttcccagcacttcagcttggaaagcgggcgggtttcaacgatacgtaccttatcgcctaccttggccgtggaattttcgtcatgggcatagaacttcttgctcttcttgacgatcttcttgaacttggggtgcggaacgcgggcaacgtattccacaacgatggtcttgtccatcttggtggaagtcaccacgccgacgcgcgtcttgcgaaggccgggcttcttggttgtttcggtttgttcggacattggattctaaaagtgttagaatattctgtaattaccggaaatcctcaattaaacctccccggtttcacccttaatggtaagggcgcgggcaaggtccttgcggacggtgcgaattctctggttgttttccagctggccggtggcctgctggaggcggagattgaaaagttcttcacgaaggctgcgcaccagagcggaaagctccttggcggacatagcacgaagttctttggcggagttcttatcggacatggtgatgagtagctttagtgttgaacgccttgacgatagacgaagcgggttgatacgcccagcttgttggaagccagccgaagggcttcacgcgcttgggattcggtcacgccgcctacttcaaacagaatgttgccggggcggacaacggctacccagccttccacggcgcccttacccttacccatacgagtatccggcggacgggacgtaaaggatttctgcgggaaaatgcggatgaacaccttacctttacgtttcaggtaacggttgatcgcaatacggcaggcttcaatctggttgttagtgatccaaccgcggtcgagcacctgaaggccgaagtcaccaaaagcaacataggtaccgctggtggcattgccggaacggctgccgcggtgcatcttgcggtgcttcactctcttgggcattaaaggcatatcttattcctccttgtgttaagtgtgatgaacaaatgtggtagcggctttcttaggcgcgcggacgacgggggccgcgagggccggacggacgggaattctgctgggagacgacttcatcgcgcttgttgacccagcacttcacaccgatgatgccgtacagggtacgggcttcggcaaagccgtagtcaatcggagtgcggagcgtctgcaacggcaccttgccttcgcggtaccattcggcacgggcaatgtcagccccgccaagacggctagcgcagcggatgcggatgccgtcggccccgcgttccatggcaacctgcacggcgcgcttcatggcgcggcggaaggaaacgcggcgttccagctggacggccacgttttctgcaataagctgggcgtccgtttcaggggaacggatttccacaatgtcaatgttgacctgggtggaagcgccgcacaggctctggaggtactggcggatcttttcaatttcctcacccttgcggccaatgacaagccccggacgggcagtgtggacggtgatgcggacactgttccaggcgcgttcaatcacgatgctggaaacggcggcggacatcaactgttccttgatgtacttgcgcatcaccaagtcttcatgcagcttggtggcgtaatcctggcccgtggcgtaccacttggagcgccagtccttgttgacggcgaggcggaacccgattggatttactttctgacccatgatattagttcagctatatgtgtgttagattggtatggcctagccttcttgatcggccaggataacggtgatatgggatgtacgcttgcggatcatattggcggatccgcgggcgcggggcatcgtgcggcgcatcgtgggcccttcatcgaccatgacggacttgaccaccagcgtatcaacggacagttccgcattattctcggcgttggccaacgcggacttgagcgtcttattcagcaggtaggcacctttcttgggggtgtaggacaggatgtcggtcgcctgggagacggacaagccttggatttcttgagcaacatcgcgcatctttttggcggagatgcgggcgtatttgtaaacagctttcacttccatgggtttttcctcgtagtgcaggttattatgaagatgatttagtcgttggtttttactgaggcagaatctccgacgcgcaccggatcggctggcgtctcaagtttctgaacaagcgcgccacatacttccttgcggacgtccgtgactacggcttctccgatggtttgagctccccgggttaaccgaaccggcatcccgacttgcattcctgccgttctgccggtattcagcaccactactccggattcggaatcaatgctgagtaccttggcttccgccagggttcccgcgccatctcgcacgggctgttgcctgtatcccagaacggattccagcaggcgcagagaactctccaccgccgtcctggcgttcgcatcttcggatatggcttgtttcatgtaggcaaggatggctccggagagcttgacggatgcctgctccagccgctggacgcggtcattaaaagcttcgatgtccgccatcgcctgaatcaggcgttcctcgctgttacctagcgcagcgccccccaaagcttccagcctggaacggatgtccaccagctgtgcggccgccttgtcggcgtcgctgcgggcctggacataggatgccttgagggccgcattctgcttttcgaggcgctcgattctgcgcgtcagtgccgccgtatcctcttccgctccctgcaacgccccgcccagccctaccaaggtggtaagagagtatgcaaggatggaagaagaattcgacatgttgattgttaacttactgattacttcttaccgataccgccgtgctgtttgaagacacgagtcggggcaaattcaccaagcttgtggcctaccatgttttccgtgacgtacacggtggcaaagttcttgccggcgtgcaccaggaaagtcaggccgacgaagtcaggcgtaatcatggatgcgcggctccaagtcttgatcggcttgcggtcgccggattcaagctgagcgtcgatcttggcgagaagcttttggctgacaaaagggccttttttgagagaacgtcccatgttatataatcctagttaaagttataatatattgattacttggcattgcggcgctgtacgatgacggagtcgctgggcttgcggagacggcgggtcttctggcccttgacgtggccccacggagatttgaggtgctggcgaccgccaccggacttggacttgccttcaccgccaccgttcgggtggtcgacggggttcatcgtcataccgcgcacggtaggacgaacgcccatccagcgggtacggccggccttgccggacatttcgttcatgtgctgggtattgcctacctggccaatcgtgcagtagcaatcttcattgaaacggcggatttcaccggaaggcatcttgatcagcgcgtaacccgcttcacggttggaaacgatggcctgctggccggcagcgcgggctaccttgccgccggaacccggacgaatttcaatgttgtgaacggaagtacccagaggaacattcttcaagggcatggcattgcctaccttgggagcaaccttctggccgctttccaccttcatgcccacctgcagccccgtgggggccagaatgtaggatttttcaccatccttgtactcaatcagagcaatgcggcaggtacggttgggatcgtattcgatagtaaggacagtagcgggcacatcaaacttgttgcgtttgaagtccaccaggcgatatttgcgcttatggccaccgccaatgtggcgggtggtgatgcggccattattattgcggccgccggattttttgaggggtctgcagagactcttttccggggtagaggtggtgatttcgtcaaaggacggccacaccttgtaacggttagagggagtaactggcttgaatgacttgagggacatgatagctttccttcctaataggggctttaaacgaggtcaagggtttcaccgttggcaagcttgacgtaagcttttttccaatgagcggtgcgacctgcatcagagcggcgctggcgcttgagcttgccgtcataattggcggtacgcacggatgcgaccttcttgccgaaagcaacttcgacagcctttttgatttcgattttgttggcgtcacgatcaacttcgaagaccagctcgccggtagtttcctggagcatggtggccttttcgctgatgcgcaccttcttgatgacttggtaaatgtctttcatggcttcttaagcagtacggctggcgagggtttctaaagcgttgtcaacgaggatcactgcatcagcattcatgagctgttcaatgttcacttccgcagcggtcatcaggagaacttcctgaacgttgcgggcggcacggtaagtggtttcgtcaaaggaagctgccacaatgagcaccttcttggcatccgtcaggtctttgacggctttgatgaaagatttggtcttgccgtcagccacggaaaattcggaaacggtgctgaccttggaggcggcaatcaggtcacccagtacgcggcgcagagccaggcgtcgggtgctcttgttcaccttcttgctgtagtcgcaggggcggggaccgaagaccacgccgccacccacaaagatgggagcgcgcttatcgccgtgacgggcattaccggtgcccttctggcggaagatcttcttgttattgccgctgacttctgcacgggtcttggaattggcggaaccagtgcggcggttcgcctggtaagccacgatcaggtcatgcacagcctgggagcccttgtcactgcctacaacctggatgttggcggcggcggcggcttctaatgtaaaggtatttgcggacatagataggttttcctataatcaatgtgaggttaactaaagccttacttcttcttggcggggcgaatcacgaggtaggaaccgcgcgcgccgggcacagcgccggagataaggatgacattatcttccggacgaacggcgacaaccttcaggttctgcaccgtgcgcttggcattgcccatctgtccgggcatcttctggttcttccagacgcggccgggggtggaacaaccgcctacgccgccggtacggcggtgcatcatggaaccatgggcggcgggagagccgtggaagttgtggcggcgcatcgccccctggaaccctttgcctttggaagtgccgatcacatccacccactgtccggcggaaaagagatccacaccgggatcttctgcgccttcagcaggcagttcggatgcttctacgcggaattccttgaggagtttggtaggctggatgcccagtttcttgaagtggccggcctgaggcttggccacgcggctttccttctgcgcatcaaaagcaacctggatagcattgtagccatccttgtcttccgttttaatctgagcgaaggtgttgcccttgacgtcaatgacggtcacgggaaccatagcgccggattcctggtcaaacagacgggtcatgccgaccttttttccgataagtcctagagccattgtagtgtgtctttctgttttttaattacttatccgggtgccaaactagatgcggatcgtgatgtccaccccggccggaagattaagcttcttgagctcatcaatcgtgcgcgcagtcgggtcgacgatgtcgagcagacgcttgtgggtgcggatttcaaactgttcagccgattttttgttgacgtgaacggaacggttcacagaaaacttttcaatacgggtcggcaacggaatcgggccgtgaactttggctccggtgcgcttggcggtttcaacgatctcctgggaggagcggtcgatggcgcggtagtcgaatgcgcggagtcgaatgcggatttttggactttgcatggacgtgcggtctattggttatacttcaaaggtttgtttatttagccttctcgctgacaatctggtcaacgaggttctggggcacctgttcaaagtgggagggttccatggaataggaagcacggccactggaaagggttcggatggcggtggaataaccgaacatttcggacaaggggaccatagccttcaaaatgcaggcgttggccttgttttccatgttgctgatctggccgcggcggcggttcaggtcgcccatgatgtcgccctggtaatcggtcggcgtggaagcttcaacagacatgatgggttccagcatgatcggcttggctttcttgaaagcgtccttcatggcgaagatggcagccattttgaaagcattttcattggagtccacttcgtggtaggaaccgtccaccacttcaacgtgcacgtccaccaccggataaccggcgacgacgcccgtggtcatggcttcattaaggccggcataaacggcgttcatgtattccttgggaatggcgccgcctacgatcttgttttcaatggtaagccccttgccgcgttcgttcggcttcacatcgatgaccacatggccgtactggccgcggccaccggactgcttgaccagtttgccgtcgccatgggcaggggcagtaatggtttcgcggtaggcaatctggggcttgccgatatcggcttccaccttgaattcacgcatcaggcggtcaataatgatttccaggtgaagttcacccatgccggaaatcagggtctgaccggtttcttcatcagtcttcacccggaaagtcgggtcttcttcagacagacggcccagggcattggacattttttcctggtcagccttggtcttgggctctaccgccatggaaataacggtttccgggaaggtggggggttccaggcagatatcattgtccgggctggtgatggtgtcgcccgtggtcacgttgcgcagccccacgatggcggcaatgtcaccggagtacacggcatcaatatccgtatgctggtcagcctgaatctgaatgatgcggcccacgcgttccgtcttgcgggtgcggggattgtacacggtgtcacctttcttgagaacaccggagtacacgcggatgaacaccagcttgccgacgaatttgtcagcccagagcttgaacgccagcaccatgggcttggcatcgtccgtagcggtgatttcgaaggttttttccggatccagcgtgctttccgcgtgggcgggaacggtttctaccggagaggggaggtaatccaccacggcgtcaagcaggaactggacgcctttgttcttgaaagcggagccaccggcaacaggcacaaatttgttggcgatggtggcgcggcggatagcttccttgagctctttgggcgtgaagggttcttccatgagcaccttttcagcaagctcatcgtccacgtcagccacacggctcacgagttcatggtaggccagttcggcttcttccttgagttcggcgggaatatcctcaatcgtgtaggtggaacccaggcgatcgttgtcggcgtaaataacggccttctggttcaccacgtcaatctggccgcggagctggtcttcagcgccgatggggatcagaatggcagcggcattcgcgcccagcttgttgtgaatatcgtccagcacgttgttgaagttggcgccggtacggtccatcttgttgacgaagcacatgcggggcacgctgtacttggtggcctggcgccacacggtttccgtctggggctgcacacctgccacgccgcagaacaccacgatggcgccgtcaagcacgcggagggaacgttccacttcagcagtgaagtcaacgtgcccgggagtatcaataatgttcagctggaaattttcgccttcgaacactttgctgataccttcattcttcacctgcttccagttggtggtaacagcagcggaggtaatggtgataccgcgttcgcgttcctgctccatccagtcggtcgtggtggaaccgtcgtgggtttcaccaatcttgtgaatcatgccggtgtagaaaaggatacgctcggacaacgtggttttgccggcgtcaatgtgagcggaaataccgatattgcggtaacgctcaaggggagccttgcgattgggattatttacgtgatcggacatagtgtctggaaagtatctgtagtgatcgaaagtgaatgattcggctgacagtcgcagaaggaattaccagcggaaatgggcaaaggcgcggttggcctgagccattttatgaacgtcgtcgcgcttgcgaacggaagaaccctgattgttggcggcttccttgatttcgttggcgagagccttgtgcatcggcacacccttgcggttacgggcgtagttcacaatccagcgcatagccagggattcggaacgggccggatccacttcaagcggcacctggtaagtagcgccaccgacgcggcggctcttcacttccacacggggtttggcattttcaatggcgcgggtgattacttccagaggatcaatgctgtccgtgccttcattagccatgtcaatagcagcataaacaatacgttccgcaagggagcgcttgccatccagcataaccttgctgatcagtttgccaacaagagcgctgtcgtaacgggggtcacgacgttcgatttttctataaacgcgtttacggcgagccataatatatagtaggtaagatgtttggtttacttggcagcagccttcggacgcttggcgccatacttggagcggccctggcggcgcttgtcaacaccgaggcagtcaagagcgccgcggacgatatggtagcgaacacccggcaagtctttcacacgaccgccgcgaacaagcacgatggagtgttcctgaaggttatgaccttcgccgccaatgtaggcgatcacttcttcaccattggtaagacggactttagccactttacgaagagccgagttcggctttttgggcgtacgggtcatcacctggagacaaacaccgcggcgttgcgggcagctatgaagagcgcgtgatttggacttctcttccggagtaatacgtcccttgcggacgagctgattaatggtcggcatgttttcctgctttggttgtggttcgtcggtctgatccgatattcaaggcgaacattcctttttataagcaggaagcgcgccttttttccggaggcaaacccgatagaaaacgtatttcttgtgcctttcggcacgtttggggacggccaatataacgtgattttatatcatgacaagtcttttattcatcttttcctaaatattttatccgttccattttccccgctcctttcaaaactccatttcgggctcccggagtcctttttcctccccgtccagcagttctccacttatggaggatgaaacaaaaaatcttcttcacaggcaaaaaaaacatttcttcatgtccgacatgttaccgcagaaaaaaatgcatgaagcgccggagaggcacaaaaaacaagctttccatcagaattcacgaaaaattttttcataaaaacggcagccggtctattatttattgttaacctgcctgctttcccattttgccctatccggaaagcatgacatagaaaaatccgtttccggaacgcatccggaaacggatttcatcaatgaactcagcagcccgctatttcccaggggtcaccagggaatgtccggacatttcggcaggctgtttcagccccatcaggttcagcagcgtgggagcgacatccgccagaatgccatcggagagagttacctgatccttgtcgtccgccacgtaaatgagatccacaaggttggtcgtgtgggctgtattcggagaaccatcctcattgcgcatgtgttcggcattgccatgatccgccgtaataagcagcttgccgccaagttccaacaccttcttcacacatttttccaaggcgctgtccactgcttcgcaggcggcgatgccggcttccacaaatccggtatggccaaccatgtccccattggcgaaattcatgattaccacatcatacttgtccacagcgtccacaaacttatccgctacttccgccgcgctcatctggggcttcaggtcataagtagccacttcccggggggaaggaacaaggatgcggtcttctccggggaactgggtctccacacctccgttaaagaagaaagtaacgtgggcgtacttttccgtttccgctatgcggagctgggttttcccggcttccgacacaatctgcccgaaaatattgttcagctgttcctgttcaaaaacaatgggagagggatacttggcatcgtattccgtcaacgtcacatagtgcactttgggcattacttcacggtcaaatccgtcaaattcgggataaaggaaagcgtcgctcatctgccgggcgcggtccgcacggaaattgaagaagaacaccacatcgttgtccctcacgcgctgttcgtcgccataggcaaaaatgccgggcttcaggaattcatccgtctcccccttcgcataacactgctccacatattcggcaggggagcaggagcactgttcgccgcgccccagaacgatggcatcccatgccagcttattgcggtcccagcgcttgtcccggtccatcgcatagaaacggccgacaaccgtggcaattttggcgccgtacggcctgacggcttcctccagctggcgaataaagccagccccgctggttggcgagcagtcacggccgtccgtaatggcatggatgcaaatatcgcggacacccgcttcataagcatatttgacgatgccgatcaaatggttgatatggctgtgcacgccgccgtcactcaccaggccaagcaggtgcagacgggaagaagcggcctgggaaaaggcggtcttcagcacggcgttttcccccatggacccatctttgatggcattgtccacccggcagaggtcctgaaagacaacgcggcccgcacccaaattcaagtgccctacttcggaattacccatctggccgtccggaaggcccacgtcctccccggaagcgcccagcaggctgtggggatagttggcaaggaggtaatcagtaaagggggtatcagccagaacagtggcgtcaccgtactctttcgcgacatcaggccccaacggattgcggccccagccgtcgcgaataacaagaacgacaggctttttagaagacataggctttatttacaggcatcccctccttttgaaaagcccgaaatcaggcattccctctccgattccggaattgcctgaggtttgccgcccttccccacacggacgactacatatcttcccctcatcaccggacgctcggaatgaaatacagcaaatttccattccagagaactggttcccaccgttcccaggcttaattctatgctcagccaatctcccagccccgcagagctggagtaatccgcctccacatgcacgcggggccagccgcagtctggggaaagaacctccaccccccgggaacgcaggtactcgtgctccacttcttccaccaaacaaagcagccgggagaaatgggccaccccggaagcatccgtatcatgaaaagctacctggcgcgttctgacaaagggaatgcagggaaaatcttcaggcatgccgtcatcctgcctcctcccccggaaccatgtccagccgcaaatgcgtgacaatatgtcacatcagcttgatttgtgacatgccgctctttatatataagagcaagccgcacggcaacggacccgccgccatgaaaaaagacaccattgacaagctgatcggccgcattgaccacatcaaggaggaggatctccagcgcttttttgttaagctggcggaacagcagggttttttccagcaggtatttgaagccattcaggaaggcctgatcctgctggataacaagggaaaaattctgttcgtcaacaaggctgcccttaaactctttgacaaggaacgcgggcaaataaccccggatgacttctgtattttcctgggcagggactgctcatgggacacgatccagcagagccagaccgccgtctcccgggacacggaaatcttttacccggaacacagattcctgaacattttcatttcccccatcggcagcaaaaaccagggccacctggtcctgatacgggatgaaacgccccggcataaaaaaaacgcagaaaaccttgaggcagaacgcctgaatgccttgacactgctggccgcaggagtggctcatgaaataggcaaccccctcaattccataggcctccatctccagctcctggccaggaaggcaaagcagctgcctccaaagtaccggacggacatggaggaattgctgaaaacagcggagagcgaaaccacgcggctggacgttatcctgaagcaattcctccaggccatccgccccaccaggcccatccgggaaccctacaacattgaaaccatcctcatggaagtgctgaaactgctggaaccggaaatccagcagcgcggcatccaaatcaacacggacctccagcccagtcttcccatcctcagcctggaccccgtccaaatcaaacaggtcttttacaacctgatcaagaatgcctaccagtccatccctccggagggaggcaccattctgctcaaaagcggttatacggatgacagcgtattcgtcactgtggcggataccggctgcggcatttcaccggaggtcatgggcagcatttatgaacctttcctgaccaccaagtccaccggctccggactggggctccttatcgttcgccgcatcgtgaaggagcacggcgggtccatcacgctggccagccagccgggtcagggaaccaccatcacggtcttcctgccgcgcgtggaacgcaccatcaggctcctgccatcctccattccctcatgaagatgcctgttctgctgattgtagatgatgaaaaacccacgcgcgacgctttgcgcatgggttttcaggatgattatgaagtgtacaccgccgccaatctctcccaggcttccgccctcctgcaggaagaatctccggacctggttctgacggatctgagactgggcggggaaagcggcatggacgtgctgaaagccgctgcctccctgccccaccctccgcaaagcatcatgatgactgcctacggctccgtggatgccgctgtagcagctatgaaagagggagcgtacgacttcgtcaccaaacccctgaatctggacgccgtggagctggtgctcaaacgggcgctccatacccggaacctggaaacggccaaccaggaactcaccacccgcatccaggcggactccggactgcaaaaactcctgggcaggtccgccgccatggaacacgtattctccattattcgtcaggtggcccccagcaaaacgactgtgctgattgagggggaaagcggcaccggaaaagaactcgtagctcaggccatccattccctttccggaaggccggaaaataaattcgtggctgtcaactgtgcggccctttccccccaattattggaaagcgagttgttcggccatgaaaaaggctccttcaccggagccggacaacgccgcatcggccgctttgagcaggcggacggcggcaccatctttctggatgaaatcggggaaatagatgccggaacacaagtccggctgctgcgggtgctgtctgaacggaccattgaacgcgtagggtccaatgcatccattcccgtcaatgtgcgcgttatcgcggccaccaacaaatcattgaaaaagctcgtgcaggaaggaaaattccgggaagacctctacttccgcctcaatgtggtgcatatccagatgccccccctccgggaccgccgtgaagacatccccctgctcgccaccgcctttctgaaggaattcgccagggaaaacaacaaggaattcaaacccctctcccgggacgcccttgaagccgtccggaattaccagtggccgggaaacgttcgtgaactccgcacggccatggaacatggcgtcgtcatgagcaattccgccagcataggcctccatcatcttcccccgcaactgcaggatacttcttcggaagccgctccacaggaacggccggaggacaatgcacccaacacgcagaatgggcttgtcccggccggggttttgaatttatccttgctggaacggaatgccatccaacaagcgctggcccagtcaaacggcaataaaacggcagcagcccacctgctgggcatcagctagcgcactcttcaacgcaaactacaagacatcctccattcatgaatgagccctcctcggcatcccgcaccccttttatcattatccttatcctgctgctggcaatcacgggggtgcagtactttttcaactttaacgggctgggcactgatgccgccatggaccacgcccaaatcgcccgcaacgtagccagggggcaggggatgaccaccaactggctgagacccatccagatggtctccggaagcacacgcgccagcctcaacccttttctttcagacgcccagatacacgaacaggaagccatccgggccggacaaggcgaaaccctcgtcgatccggaaaaattcaatccctatgccctccgggacacacgcaacgctccgctgaacatcctgacggaagcagctgtcttcaggatggtaagcgtccacaaattcgacctgtggagcatgacgggctcatccatgatttacctgcctgaccggattgtggcgggcatttcctgcatgtttttcatcctgtccgtcctgagctgctattacatccttctccggatgtttgacgtcaccatcgcctgcttcacctgcctgacgatgatactcagcaatcttttcctgcaatacgctaccagcggcctcccgcagatgatgatgctctttttctttgcctggggcatccactttttgtacacggccctgcaaaacaaggaggaaaaccgcgcattcctgtggcctctcatcggcagctccatctgtttttcatgcgtctgccttaccggatggatcgggctgtggcccatggccggttttctgatttttgcaggcatccggttcaaaccgcacggcctgtactgcattccgggccttatcattctccttcttttcctggcctaccccatttacatcaaccgctccctcagcggaggcttcttcggaacagcttattacaccatcttcacggggctgaccggcaatgaagaaatagcgatgaacgccctggtttccggaagcattcctatcgctgcccaaaaagtagtcacttccgtcatcaacaacattctgacacagggtgaccttctctacgaaaacctcggcaatctccccctggccatggtatttctgctggccctcctgcataaattcaaacgtccggaagtcaaccagtccaaatggggcatttttgccatgtgggtccctgccgtcatcggcatggccatttatacctccaataaaaccggcatttccttagggcaaattcaaattctcttcgctccctttttcacggcctatggcacggcatttgttctcaacctgatagccaggcattccaacaaagagctaatctccatccttcggggaggcgtcctgctgctctcccttctcatcacttcccttccgcttctgctcaaccttccgcacattgtgcgggtgggcatcctgacggcttaccgcggcattccggcatggccgccctactatcccctgggccttaaccgggatcttcgcacccagacggcggaaaaggatttcattctcacggaccagccgtccgccgtcgggtggtatgcagaccggaaagccatcggcatccccaaaatggtggaacaattcatggtgctggaacgcattttgaaatcccacggcggcaaggtgggcagcattctggtgactccttcttccacgtcaaaaatgaacctccgcaccatttcctcctcctatggagaattcactcccctcgttctggaaggcacggttctgttccagaccaaggataaaaaccccgtgtacatctttgaccacagccgggcgcttgcccccctggcgcagcgctttggaacgcctgactcccgccaattcattcagggagcggaaatgattctttacaaagaccttcaggaaaccgcccctcaaccttaattcccatatggccaaacaacggaaaaacgctcccggatttgaagaatccgtagcacgcctggaagaaatcatacgcctgacggaagcccccgtcaccgagctggaagacatgatagccctggtggaagaaggcaataagctcatccgtcactgccgcagcatcctgcatgatgcggaactgcgcattcaaactctcagcaacccggaaaccgttcaggataaaacggatactgatgaaccagacagcaatgaattctccctcacctgaacttccggaactgctggcaagcatccgcagccacgcagatctgatgaaaatccctgagtcggaactgcccaggcttgcggaagaaatccggaatactctcattcactccctttccctcaccggaggccacctgggccccaacctgggcgtggtagaactgagcattgcccttcaccgcgtctttgaaacgccgcgggataaaatcatctttgatgtctcccaccaggcctatgtccataaaatgctgactgggcgcgctcccctgatccacaccatccgccagcacggggggctttccggatttgccaaaatgtccgaatcccctcatgactcctacggagcggggcatgcgggcacggcgctttccgccgccctgggcatgtgcgcggccagggacctgaaaggagaagactaccatgtggtggccgtagccggggatgcggcattcacctgcggcaccactctggaggcgctgaacaatatcagccagaccaccaaacggtacatcaccattctgaatgacaacgaatgggccatcgacaaaaacgtaggagcgctggcaaaatacttcaactccctgcaaacatcggaaacgttttcctggttaagggataaaacggcctcctttattgaaaagctgggcggcacgcaggccagggactttgctttcaagctggaaggcaccaccaaaaaccttatcttcccgtccctgctgttcaacaaattcgggctgcgctattttggccccctggacggacacgacattcccaccctgatacgcacccttgcctacatcaaggatctcaacgaacccgttattctgcatgtggtcactcagaagggcaagggctaccagcccgctctggacaaccccaccaaattccacggcctgggctcctattgtgtgagggacggggaaacgcaggccgcccccacccccacattctcccatatcttcggctccacgctggtggaaatggcgcgcgaggatgaatccatcacagccatcacggccgccatggccagcggcaccaagctggacttattcaaggaagccttccccaaacgctatttcgacgtagggatcgcggaagagcacggcgccctcttcgcctgcgggctggcggcggagggcatgaaaccctacatcgccatttactccactttcatgcagcgctgtattgacatgattcaacatgacgccgcgctgcaaaaactgcccgtgcgtttctgcatggaccgcgccgggctttccccggacgacggccccacacaccacgggctgtttgacattgccatgattcgcagtatcccgaacattgtcttcatgcagcccaaggatgaagccgaattcgtccacatgctccgaaccatgaaccattaccagaacggccccaccgttatccgctatcccaggggatgcggcgccggaacccccgtccccgccaaggcggaaatcctccccatcggcaaggcggaagtacttcagacgggacaggatgtaaccctcgtttccctgggcaccatgatcgtcatcgcccgggaaaccgcctcgctgctggaagcccgcggctacactgtcaccctgatcaatgcccgtttcatcaaacctctggatgatgaatgcatccgccgtcacgcagcacgcagccgggtggtctgcaccttcgaagaccactccatcagcggcggcttcaactcagccgttctcgaatccctggaaaccggaaatgtcaagacgcccgtggaagccatcgcttggccggaccaattcattgagcatggttcggaatccatcctcagaaaaaaatatggactcacggcggaagccgcgctacaaaaaatcattccccacctgaactcctgatctgtttatgaaaacacgcaccttcctgctggcagcccttgcgcttgcccttcttcccgtctccgcgcgacaatccctgccggcctccccttcccctgcctggattcaggaattcaacaacctgccggaaacaaccagaaaaagctatatagcccaattccgcaaagcggaacagctctttgcccagaaaagaatcatggaatgtcttttttccctcatggagctggaaaaactttatgccggaaatccgggtttatacaacctccgcggcgcatgctacattgaaatccgcaatatcgaaaaggccctgggaaattttgaaaaagcccagaaactggatccctccaacctcaccatccagttcaacctggcggaagcgcattacgtcaatcacgactattccagggctctgaaagcgttcacggaactccttctccccttcaaggacaatcccggcatgacgcccctgctgcaattcaagcgttatatctgcgcccgcaaactggataaccagcctcttgccgcggaattggaaaagctgtacggcccgatggatgatacgccatactactactgcacccaggccatcctcaaactgatggaaggggacaaggaagccgcccagggacagctcctttccgccatccgcatctacggaggcaccagcgccatccaggccttcacggacgccatgacggaggctggcatccttccctccccctatgggcaaaccgtcccaaccgaacagccggtaaaaaccggactggaaaaacgccgttaatgaatgcggaagcgacggtcctgaagctttatcccctgggagaaaacggcctgattgccgtctggtgcacggaagaaggccttatcaggacagcggcaaaaagcgccagaaaacccggcagcccctttgccgggcgtctggacattttctatcagtgccgcatgcagtggacgcaggcaaagaagggggatttgcacaccctgacctccgcagacctgctttcaccgcgcctggccctccggaaaagctacctccggctcagtgcggcaggctatttcgcgcgcctgtttctccaaatgctggaaccggacacgcccatcccggaattttacgacttgctgcagagggcctacacctacctggaaaacaatgatcccacgctgcgcgccgtcctgcacttcgaacaggaactcgcccggctgcatggaatagcccacccaggcatcccggcgcacgtcattctgaaatcccacttcggcaagcttcccccacagcgggaaaaactgctcggaagcctggaacaaaaagaaagctgagcaacatgcctatcctgctttcatcctcagcaggggatgttccccgccccgctcaacacgtccttcctccgggacgggatgcgcattgttccgtgcgcgagattgacttgtccgcagccttcgggcagaatatccggcacggttttactgcatgaagatccttgacagatacattgcccgccagctgctgggtgtcacggccctgggggtaatggccctgagcgccctgctccttctgggaaacctgttcaaggaactgcgtcccctcctggtggaaaacaaggctcccatcagcatcgttctggaattcatcttccaggtcatccccttttcgctgatgttctccattccgtgggggttcctgacggccgttcttctggtgtacggccgtctggcctcggacaacgaactcacctccatgcgcatgtccggcatgagcctgtggcgtctgagcgcccccgccatcgccatcggcatcgccctttccggcctttgctactggattaacatagacatcgcaccgcgcgccaagcaatccatttccgagttgctcatcaaagccgcatccatcaacccgaaggggcttctcaatgaaggccaggccattaccaaattcgacaacctggaaatctacatcgacaaacgcgtggacgacgtcatccacggcatgcatatctaccagaaagcggacgacaaatccccgtctgtggccatgcactcggaacgcgtgaccatggatttctcccccgagaaaaaaatcctcaccctgcatctcatcaatcccctcattaccacgcaggaagaaggttccatctcccaaagcgtgaccatggacgagatgcctctgagcatcaacctggacaaatcccgctcccggcgcatcaaggccaaccgcttcaccaaccgggaaatccgggaagctctggacacgcccggctatctggataaaaagcagaccacggaattcgccacggaactgcccaggcgcgcctccttctccctggcctgcatcgtctttgccctcatcggcgtgccactggccatcaacacccgcagaaaagacacctccacaggatttgccctgggcatcctgatcgcctcactctactttctggccctgatctttgcagacttgtcccggaaaaacgacacgatgctcccctatattctgctgtggcttcccaacatcatcacggttgccgtggcgttgcaccttcacaaacgggccaggcacaagggataagcccccggcggaagcccttcccgctggcgtggaattagctttcacagcatgggagcttcgggtaacatgatgtgcatgcagcacgtccccaccatcgccatcgtaggcaggcccaatgtcgggaaatccgccattttcaacagaatggcaggcaggcgcatcgccatcgtgcatgatgaacccggcgtcacccgcgaccgcctttccgccccctgcaagattacggaccgcgcctgtaaaatcatggatacgggcggcatcggcgcgcgcctgagcgacggctttgcagaacaggtagaggcagaggcggacattgccataaaaacggcggacctcatcctcttcgtgctggactgccgggatcaccttacacctatcgaccagagcatcgcggaccacctccgcaaatcggacattcccgtcatcctccttcttaacaaagccgaccacgaaaaacaggaccttaatctgggcgaatttgccggactgggttttgacgaccatatctttctttccgccgcccacggcagaggcttttccgaattagcctcccggctggacggttttctcaagcagaaaggggctccgcttaaagaagaactggaggaagaaccggaaaacggagaggaaacggcccttcccatcaaggtagccgtagtgggacgccccaacgcaggcaaatcctccctggtcaacgccatcctccgggacaggcgcaccattgtctccaatgtggcgggcactacccgtgacgccattgacatcccctacctgcacgacgaccagccctacgtgctgattgacaccgccggcatgcgaccacgctcccgtcgggacacctccgtagaagttttctctgccatgcgcagtgaaaaagccatccgccgggcggatatctgcctgctggtcattgacattgcggcgggcatcacgcagcaggaccgccgcattgccggcatcattgcggaggaaggaaaaccctgtatcatcatcgtcaacaaattcgacctcttccatccgaatgcctcccgtaaggaccgcatggcggaagtggaggaacaggtgcgcagggaactcttcttcatcagctacgcgcctttcatcgccacctccgccaaaaaagcggaaggcgtggaaatcatcttcaaagtcatcacgcgcatccgccgggaatcccataacctgcccactaccggccagctcaaccgcctgatccagcttgcccagcagatgaatccccccggcgccgccagcggctctgccagaaggttgaaaatatattacgccaccacagcggtggaccccaagtacaatactattcccgtcccgcgctacgttcttttcgtcaatgacaaaagcctgctcacggacagctattcccagtacctacgtaacaaaataagggaagcctaccccgctcccggcattccggtcatcttctccgcccgttcacgcgtgcgcaacgactgatcatccctccttctccgcatgctctccgtcaggaacctcagcgcctccttccacaccagggccggcattgtccgggcggtaaggaacgtgtcctttgatgtagccccgggggaaacgcttggcatcgtgggtgaatccggatcaggaaaatccgtcacctgctactccatgatggggctcattccgatgcctccgggccgcattgaaagcggttccgccatgctggacggcacggatctgctccgttgcccggaaaaggaactccgggccatccgcggcaaacgcatctccatgatcttccaggaccccatgacctccctcaacccgtacctgaccattggggagcaggtggcggaaccccttgtcattcacgaaggggccggcaaaaaggaagcgcgggcacgcgcgctggaacagcttgccctggcaggcataccggatgcggaacagcgcatggatgcatacccccaccaattctccggcggcatgcgccagcgcgtgatgattgccatggccctcatcaccaagccggaaatactcatcgcggatgaacccaccaccgcccttgacgtcactgtccagaaacaggtgctggatctcatcagaaaacttcagcaggacatgggcacctccgtcatcctcatcacgcatgacctcggcgtggtgcgccaatacgcggaccgcatcaatgtcatgtatgcaggccgcatcgtggaaagcgccccggcgaaggaacttctggaacatccccggcatgcctacaccagagccctgatgaaatccattcccgggctgcatgcgaaaggtacccccctctataccattcccggactgcctcccaacatgactcaggagccatgcggatgcagcttccgccccaggaacaccctcggaaacccggcactctgcctcacggaccgggaaccggagctggtggaaatatctccggggcactcagtccagaattgtccgggctgcctggcgtagcttcctttctttcctgcctgtttgcacgcagataatgccgcgcacaggaaaaatggaaaacaaagcgtcaataacggtggttaccccatcgctctccagagaaaaacaacaggtttggcaatcaagagaaaaaactttcttcattcgcccgcccacgttaaggaaatctctaaaggcctgccccctgccatgacattttaacgtgctcagcacctgttggaaccacgccacggaaaatcctttaacagaattgatttccgcacaattcttccagaataccgtaaaaacggcccacatgcaccccgtccaccagcacatggttcgcctgaatggccacgggcatcaccatcctgccggaagcatccgcctccatcttcccccaatggatgaggggaaagtattgtccccgaaacactctgtaggcactggccacctgtgtgaatggaatccacggcaggcagctgaatacggcgatatccgccctatggcacggattcgcttgggcgggagcaagtttggcagcctgcacaagaggaacggcatgtttcaggaaatcagacaactccatccggtattccactaaaatctgagtgaattctccatccgcagccagcaccggaaccagggcatccacggactcatactcccatacatccccttcctccacccgctggcgcagctggggcaccctgttcaacgccttcagcagcacaaacaggcacaaaatgaaaaaggaaaccccctcccgtttcgcataacggtacagagcatccacccggaccggggacgtaatggaaaacatggggcagtcaaacgtctggaaatactcataatgagaccttcgaggccaggaagaaatttctattttctttttcatgcacttattttctattcagggaaggctccccgtacacgtttttgcgtttttgctccggaagcaaaatactgaacaggacgggagcagtcaaggtggcgatgcccgtaaatatcccccccacaggatgccagcaaaaagacattaccagaagctttcccttaaaaaagcaaatcaggagggcgatccacaccggccagattatcgccagccagctcccatccagtccggcatcatgaaaacgcctcacccccagcgcaatgaaacaaaataaaaagaaaaacagcagcaacagtcccagcaaaaaagcaaaaaatattccgaaaggaagggattcaaaccaaacgctggctccacaaaaacacgccagccatatgggaggggcaaacaccagaagcgccccataggcaacaaccgcctcccagcgcgaagaacgcccccgcatcgccaacagggaaaacagccaattaaaatgaggcttcctgccgcacctccatactttgccaggtttcatccactcctcagttccggcatcttgttccttgaaagactgccattccggcggagttccggaaacatcccctacccatatccagtcctccgaatgttcttcccggaccatcagccccagcggcaatccggcatagcatatttcccgaatcaaaaaatcgacatcgaccggtccatgcaattccccatccggcgtatggtaataataacgtttcacaacagcttctttccttccattattccccggctctaccggaaattccagcctggctgttcccagcgccaaagcattgattaatgcttctatttattcaattatcaactatgttgcaacaaagaacatcctgaatgccccctacccctcgcgaacggaaagcaaatccgttacggacgcatgcttcatacgccacgcaggcagaaggcacgccaaggatgagagggaaagcaccaaaagcacagcacaggccagatgcgcccagggcatcgtgacaggaggagtaacgacgccgaagtgatagccgtattccaaaatctggatggagcaccaggcacccaggactcccagcacaagactcatgacaacggagcacagggaaaccatcagcgtttccgcccagagcatccgcattaccatgccgcccggcacgcccaccgcacgcatcaatccaaattcccggcggcgggactgcacggaagccaggacggtgttaagtacggccagaacggcgatcaccatcatgatgatgggaagcttgctcatcgtaaaaatcacatcgtccccgcggctggtaacgcttcctcccaggctttcccgggtcagggccttcaccagaggcttggcgccttcccctccgttttcctgctcccgcaccttcatcagggcgtattcccccaggtcgttctgaagttccacgttgctgatccccggagcagtatccccccagataaactggaatccctgatgagcgtattcctctttgagccagcgttcatcggcaatcgccaaagcggcaacaaaacccccgcggcgcacgcgcattccgctggtcttggtcaaccaatgccagccggggaaggaaactattcccgccaccttccagggttctccccgtacggcgcccccctgccccggccgcgaataccggcagagggctcatttccggaacggcgttcccgggaagacggattaaccagcatcaagtcatccccgaccttcaaccccaccgtccgtgcaaacgtgtccggaatcaggagagaacgggtggattccagcatggcataagcctcctgcggatttccggaaacaaacacggggttgaacagcggatggctccccccggccatctccgccacgggaatgctagccagtacgatggaacggttgcgcatcccggaaaaaccggggcttttcatctgtgccggagcaatatccggttcatccacgtagatgggatacattcgggaattccgcaggctggggcgcgccatcagctccggaacatccgcagatttgaactccgtatgcaggaaagaaaccagggttccgggtgttgacgtatccggggaaaaaggaaccagcatggaatagccccatgtctgcacccccacaaaaagagagaggcccacagacatggatacggcagttcccacggaacggctgaggttgcggctgagctgcattttcaggaaagaatgcggaacgtgcagcagaaatccggtaatccatgccccggcccactccgtcacgcgcacgaaggtgggggccagaaacagcgcaccggctaccaggccggggtaacccagccagaaaaatatccatttgcgcgtttctacctccaggcccggcaacagcagggccgcaggctgaagacacacgcatgcgaggcccgccacgacagaccacacaggaacacggctcaccttcccgatgaatccggaggaaggaacggccgcttccagcggagactggcgggaagcgcgccacgcaggaatgatggaagccagcaaggccccgcccacagcgcatacggcggcggttaatactgtggaccaggtcagcacgggtacagaggcagagccttcctccagcaggtacaccaggaaaaagcctgcggccagccctcccagcaatgccggaatgcacagaaaaatcccctctcctgcaatcagcagtgcaatttgcatgcgccccagccccagagcacgcatcagggccagtctgcgggcacgttcgctgacgccaatgctcagcgttgtgaaaataatgaaaatacaggaaaacaggacaagccagacggacatttccgcgctatccttttgtgaacggacggaccggtcgctggaaagccgccggatgatggaatccgtatccgccaccgcagcggaagcctggaccagctcctgccggaaattctcagcaaattcctttttgtccaccccttccttgagctgaacgtaaatcaaattgggggcaaaaggctgccccgtaattttctcgcataccttcacgggcacaaaaagggaggaaaaagccgggccggacatgccgcccggccccataatgacgccgggggtggccttggcctgcttgacgatgcccacaatctttacgtcgtacacatgcgttcccacgcgcacgttcatgacagtccccactcccgcgctgaaatatttggcgcttccgctgcccagcaccccctccatggctgaggaggaagccatatccggccaaattccctctttcaattcataaggacactccacagcatggtttcccaccaggatggggctctggggaggaattcccatgcggtcgcgcgtctgctcgtcaaagctgccccgctcatttccgcagccgatttggaggcgcggcacctggcacgcggcgttcaccgtttccacaaggggagaggcagccagacgggcgggcagctccgggtcacggaactgcgggtactgtccgggaggaaggggccctttgggagactccggcaccaggcagaggtcataattccccatataggcctccgcatcattgtcaaactccctgaccagcgtatcatagctccccatcatccatacaatgaggctgacggagacaaggatggcgaacacgctgacagccatccggccggggttggcgcgcagatccctccaaatcagtttgaacatcaacgtcataaggcgtcattcagcgtacgttcatagaaggaggacaattccgcaggaccggcaaattccgctgtggatctgtcgtccacaatgctgccgtccttgagtacgattacacgatccgcccacatggctacgtccggcgcatgcgtcaccaggacaaaagcacaaccttgcgcacgatgcaaatcccggaacaaatctcccataagccgggtattttcagaatccagattgcccgtaggctcatccgccagcaccagagcgggaccggagaccaatgcacgggcaatcgccacgcgctgctgctccccgccgctgagcgtatccggcatggcatgccgacggtgagacagtccaaccttttcaatcatggcgtccagggcggcggaagccaccttcctgcctcccgccagggacggcaacagaatgttttcctccacgttcaaggtgcccaccaggttaaacatctggaaaatgaaccctacacggtcccgccggtacaccgtcagggaggcatccgacatggaaccgagatccatcccatccaccgtcaccgtgccggaatccggagccagcagccctcccagcacgttcagcagagtactttttccggagccgcttgcgcccatcacggcgacgaactctccccggttcacggtaaggctgatatctttcagcacagttatactcccggaaccggatttgaaaccgcgcttgagatggctgacggaaatgacgggggaactcatggcggaaacgcaaggttaaaacgtggtcttcaggcctacttcaaacgtgcgcggctctcccaccgtgcactgcacggcatggcgggtggactgcacgtactttttatcgaagatattatacacagccagcctcagcgtggcatctttcagccatttggattccggcagggggatttccaccgtaaagtcgaatacgctataggaggggatggtgtagttgtccgcaatttttgcgccccggaacgtagcgtagtaggaatccttgcagcggtagcccaggcccagcaccgtaccgttcagcaaccctccgtcaatgcggtacttctgccagagggccagagcattcggagcaatcgtgggatacacttccccggtggtccggttcttggtgcgggtgtaggtgtaggaaagataggaactccaattcttggttatttccccgttcagggaaagttccacgccttccgccctcttggagccgtccgaatagtaccggttggtatatccgtctatggcaacaggcgtattattctggatgatgtcaaaccaggaagcggaaaaccacaccttatcaaccgggctgacccggaacccgaattccatctggtccgtacgccaggaatcggtcaattccttcccgttttcatccagatacccgaagttgggggcggaggtacgggctgcgttggcgaacaacgctacgcgttcgccgaacatgcgggtaattccgaagcgggggctccacgcaaacgcataattattgtccaggctgaaatgcgcgtcaccgcgaacgcttaccagaaaacgccactgtccataactgaggacatcctgcagcagaaaaccagccctctgcaccacggtatccgtcgcattggcgccggaataatcgcgccctgcagggaaaaaaggaggaggattgtacagggaaaaatagccgttcgtatttgcggtggcgtttgtcaccaggctggaaccgtctccataagtgctgctccccgtgtaagaaacgcccatcagggcttcatgcttcacctgcccggtcttaaattccgccagtgcgttggaataaaaatcccagttgatattccactcgtcgctccaggcggcttcatatttggcctttccggaagcaatcatctggttgtaataatccgccgtgctggttcctctcccagcggaagaggaaatgccccagacattatagtccacatcgctgtacccaataccgccgccaatgcggatcgtccatatcttttccagcttgcgttcgaaatccagcatcgccagcagggatttggaattaagccttccgctcggagaaccgtaccaagcgtcatacggccccacaaaatggccgcccagcacagggatgcccatggtcgtcggagaattctgatactggaaactggtcgtcagcaccgtcttggtgcgggaatcatgctgccagcggaaaatgggggacaccgtgtacttctggcctccgttggctccgttgctcagccagaacgggcgttcatactcggcggctaccaccgtgcgcagggcaaatccattcgtttcatcccccctgtaccgggtatcgtcaatcgttgcgcggtatttctgcccgtgatgggaaaggcgggcgtaagccgtcaactccgtccgttccaggaaatcaggctccttcaggatcaggttgatggaaccgcttgcgccgtatgccccgagcgtactggtctgaccgccggaaatggaaccgatggggcctttgacaatctcaatattttctatcagggacgtatccatgccataccccatgcctcgcgggaggggcatgttgccgatctgaacatcactgcaagcaaagccgcggatggtgtactgatccgccgtacgggacaaaagcatgtccccacccgtattgacggaggaatccatacgcagcgcttccaccagggaatcggaccccttggaatccatcaggtcccttgtaatgacgtttaccgtttgcggaacttcctccgtcttcatgttcgtaagagtagcggaactgaccgtttccgcccgcagggacctggaacggatggtcatcacgcgttccggcatttcctgcacgccttcctctgctgcggcgggctttgtctcggcataggcagattgtccgagaacaagcaggctcccaatggcggcggcacggtgcaagccgcgcccctggcggcgatggcggggggtattcatgttggataaacgcataggggcaagtataggacggaacaaagaaccgtccattcccgtttgttaacaatttgataacagaccgttccttttccttccggcaaaagcgcatctgatggcagaacggccccgccctttcacaaacccaaagcctgcgcccggctctccgccgcggccttcagccattcccgcaatgcctccttatcccctgcagccagccaattcctcacttgtcccagctgggacagggcttcatccagacgctccagaacagcaggggcattttccgccagaatttcagcccacatggacggttcccccatggaaacgcgggtagtatcacggaaacctccggcggataccagccccagcagcttcacatccccaccgtccagggcgctgtggacgcacagggcggacaaagcatgaggtatgtgggaaatgcgtgccacggaagaatcatgatccgccgctttcatccggatgcagtggcagcccacacgctcccagaaccgctggagcaacagcagcacatcttcatgcacatgctcgtcattcgtcaggatgcaggtcgcatcccggaagaggtcccaggaagcatgctccataccctgcttttcggaaccggccatgggatgggagccgataaacgccacgccggctttcttcagcacggagcccacggcctggtgaacacaccccttcacggaacccacatccgttaccagtactcccggtttcaataaaggaagcatatcggaaacaaggcggggcatcacgccaaccggggtagccagcacaaccagatccgccccctccaccacctcttccatccgggtggaagcggcatgggcggctccggaagaacgggcatattccaacggttcttccctcctgccccacaagcgcacgtgcacatgcggcaactgcttcctgacggccagcgccagggacccgcccagaaggccggggccgagaatggcgacggaggagaaaaaaagctgctttctggaatattctctcatggatttacaggggaatacatcagcgccccggaacatcggcatgtccaggggcgcggcgtgatctcgttgcggcggccgcatcagggcacgcggaacttcttgatctcgttggggaagttggtgtcccgcaacaccgtcccggagggatacggcttattggtgctcctgttcaaaatcttgatcttcttggtacggtcatacgggctgaccaccaccgtgggatccgccgtaggccacgccaccgggatggaagaagaagcgggaggttccacaggcctgggggcggcaatgccggaaccggcggagtcacccacgggattaggaacgacgggcttgggaacaacgggagccggaggcgtgatattgttggccccgcccaccatattgctgatggttccggaattggtccgggcggggtccgggttaaacccggaattctgcccggccatcgggtccagagaattttcacgctgaatatcattcaacaggctattgccctggacgcccatagcgccggacggatagacattttccgtaggataaatgccgatggggcgttcattcacgcgctccgtttcacaggaaggcagaagaattgcacctgcggccagcagcacgcctatcgtcggggaagtactcatataatctctcttcgggtgatagctttctgccagcatcctacggtcccgcaacctcatgtcaaccataaagcctgtttgccgaacctcttcatgacaaggaatcttcggcttccgtccccgcacgcgggcaaagccgcccgaacaaacgcgctcgccgcatttcttttacccatcggcagcgccggaacagccctggacgggctcaacaaagggaagagccgcaaaacggccgttttaccgcagacaggcgtccgaatagccggaaagcggcacaaagacggaacaaccatcactctttatcaacaagcgctccaacaagtactcctgccgcagccttattcggaagaagccggagctccattccgttcgccagcgggaagagacgcttccctcccgaacatgccgcgccagcctccggccctcccctgcccgccctcttcaaaaaaccggaaaaaacgcttccccctcttcccgggaacgcgcctgtacgggaacagattatccttccctaccccccatgatctgctacaatccgccccacatggatgacgtacagacatctaagaaaaaaatgccctcaaaaaaggaatggaggggattttattccctgattctcattcaagcccagaacgctttcaatgaaaaagccgcccagttcctgctgattccgctgggcgtctggctggcttccaccaacgccgcatacggaccggattcctgggtcaactccctccagtacattctggcctgcatctttgttctgccctatattctgttctcccctttcgtcggatggctggcggactgcttctgcaaggcccgcatcatccaattcatgtctttcctacagattctggtactgggggccatgcttctgtgctataaatacgaaaacattgaaatggccgttttctggttctgcgtcttctccgtccaggcgaccatcctgagtccggccaaaaagggagtggtcaaggacatggtaggctcccggcagctgggctacgcttcagggctgatggaaatgagcctcatcctgtccatgctggcggcccagataggcatcttcgcctggttcgacatcctgcaagtctcctccaatgacggctgggaagcagccgctttccccacattcatcctcacctgcatcgccgttcccgtagccattgcgtccctttacctcccgcggtatccggccaaccagaccagaaaattcgaatggaagctcttttacgaacatttcgtgcagctcaagtatctctggagccagcgggatttgaggctcagcgaaatcggtgtttcctacttctggttcctggccggagccctgatgctcatctccctccagatcgcccaggaacaccccattgacggcaccggattcagcatgtccgcggccattctcatggcatggctcagcggcggcacggtggtaggcggcgtcatcgcctccatcatctgccgtaaaaaaattgaactggggctcatccccctgggcgcaatcggctttactatcgggtgcatgttcatgtccttcttcgctcccggctccctccccagcaacatcgggttcggcatcaccggggctttcgccgccgcgtacctggtgccgttaaacgcccacctccaggacaattgcgacccctccaaccgcagcaccgtaatcgccgctggcaacctgatggactgcctgatggggctggtggccgtcggcttccagctcatgctcaggaacatcttctccatccagaaccaattctgggtgctggccgccctgggcgtcgtcattaccattgtggcattccggcttattccccgtgaattcatccgcatgatgggcctctggatcatgaggattgtctaccgctcccgcatcatccaccaggaccgcattccggaagacggcggggccgttatcgtctccaaccatgtcacctacggggatgcgctgttcctttctctcatttgcccgcgccccatccggttcatcgtggcggaggaattcgtagccatccgctggctcggctggattctggaactcttcaactgcctgcccatttcctcccgtaatccgcgggaatccctgtccaaggccatccaggccctgaaggccggagaagtcatctgcatcttcccggaaggccagctcacccgcacgggaaccctgtgcgccgcgcgccgggggctggaaatgctggcgaaaaaatcgcgctgccccatcgtgcccatttacatggacgaactatggggcagcatcttctcctactcaggcaaccgtttcttctccaaggcgcctctccgcgttccctaccgtttcaccgccgccatcggagagcccattgagcctgatgccgtcaatccccgcatggtcatcaacacgctgcgggagctatcctccacatgcctggaaattgcagccagcatcggcagggatgccatcctgaaccatctggagcgcatcgcccacaaaccgctggtcttctctaaaaacgcgcggctctccgggtatgaaatagcggaatgcctgatgaacgacaccgtggaagcagaacatccggaactcaggaaatggctgtccaccctgctggacagcacccgctcccaaagccgcctgtgcgacttctggatgaacgcccagcagctggaacgggtgaactccctccagccccgggaacttctgctcaccagcgtaggacgagaagaagtccacgaaacggtggccgccgtcctgtggcccatcctcaccagcactcccgtttacctcatcagcgacggggaccacagcatgccggaaggcatcaggcagataatggctcccgatttcctgcgccgcaggctctacagcctggttccgaatacgcgcacgccgttttatgacttcagcggttcgggcgacctggttctccccaacatcggctggaggccctgctttgccacggaccgcggcattatcctggccatgtccatgaagagaagcgtcttcaagctggatgacggcaccgtgcagctcggcatgcgggccaggacaagaggtcgcctcctccccggcttttacctgaatccccctctttccaacgtcatcgccggggctaccctctccaccccttattccctgccgcccaacctgtatctggacgagtcgggcttcctggcggaactccagtcttccaaccatgaacaataactcctcgtcaacccgccttcccatcccgcagtatgtaatgacgctggcgcacgcggcagccctgcggtcggaggacccgtaccgcaaggtgggagccgccgccctggatgcggacaaccgcgtcatcggcaccgcctacaacggactgtatcccggattcaaggctcaggacaccttctgggccagccgggaagaacgccagaaatacatgctgcatgcggaaatcaacctgtgcagcctgttccggaggggggaagccaaggtggtggcatgcactacgatgccctgtacctcatgcatgcaggcgctgtgcgcccatggcgtaaagaccatttattactgtgagccttatgacaaatccgaagctcctgccatcgccagcctttacggcgtggaactgatccaggttacggactatcctctcagcaagcacttcccccttgtcctggacagctgatgcccggaaaatcaatcccggtgcacgcggcatgtccaaccggccatggagcggggaacgccgtcaatggcagggtccaaatcaagcccggtttccgtaatggtgcccgaagtaatgacgcccgcatttcgcccggcgtcgtcaaaggcaatgttcacattcgccatggtacaggcggagctgctgttggcagccggagcaatattcaatacgcaagcattctccccgctattgaaccggtacgtataaaccccgtcgtacacggctcttgtatccattctgataacatctacgtcctgcccgctgaactggagctggaataagatgcttcctccctcaaacaggcttacctgctgtccgctcagggaagtgttcccgtcgtctccggattttcccgaacctccgccgcatccggacaacaatccgcacaccgtcacaggaatcagcaacaagacagggaacaactttttcatccccggaaaaatgcacaaccaaaatatataagtcaagcacactcaactattattgcatttttccaacattttttaacatcacaaaaaaaccgcctgttttcacaggcggtctcaagaaaacacggaagcggtcagccaacccatttccaggtaatgggtatttcaatatcagggtgcaggctgtgcttgaccgggcagctcagagcagcctgttccagcagcttcctgtccggataatcggacggaagaggaacggtaatgacgacttccagcttgccgatacggcggggatccgcattcatgtgtttggccacttccaccgtcatgccttccagattaatccccttacgttcggcaacaatacccatgatcgtgctcatgcagcaagcaagcgccgctcctaccaggtccgtgggggaaaaggactcgcccttgccgttgttgtccacgggggcatccgtggaaagcgtggccccggaaggttcatgaaccatggaacaatggaggccgccctcgtacgtcgttttagtttttaccatggccttattttatacaaggctccccgccatgcaacacacaaacattgaatccccccgttctttatggtaaccgcctttgctatgagaaactttttgaaagcagccgtcggctgcctgggcatgatcgccgggtgtttcagcacgggggaagcccaggacttcggaggcatgagcttcggggaagcgggaaactttggtccgccccagacatccggttcctccaaggccactgtcacctcctatggagaagcctccttcgtcatcgtgacggagctggcgctgccggaccactggcacgtttactacaaaaatccgggaaccgtgggccttcccatggaagccgctctccagcctgtgcccggcttccgggtggaaggccccttctggcaaatcccggaactggggaaagggcttgtggatttttacggatacagcggaaaagccaaaatggcgttccgggtgactccggaaaaggatgcccccccggaagcgacgttcaccaccaccatgacatggcaaatgtgcgcggaacagtgcgccgccccggaaaccaaaaacttcagcgtcacactgaagcgcggagacgggcagacagcccctgacgcggcggaattgaccgggaacatggcagggcttgccgcccccgactgggcggaagggctgaaagcccggatttcccaggaagggaaaaccgtcaccctgcacctcaggacaaacggacgccccattccgcaggattccgtctattttttctgcaatcagggggaaatcaaccctaccactccccaaattttcaaaaaactggatgactccaattatgagctgtccatgcaattcaacgacaccacggacggcctttaccccaacaacctgccggatgcagacagggggaaaccgctgaccagcctttccggcatcctgcgcgccggcagggaaggcatcatcatcaccgcggacgaccgccccttctccggggaatctcagtcaacagccgccggaacggaatccgccccggaatcttccgcttccatccccgctcctccgctgatgggcctgggggaaatcatgttcttcatgttcatcggcggcatcatcctcaatgtcatgccgtgcgtcttcccggtaatcggcctcaagattatgggattcgtccagctgggagggggggaacggaaaaaagtgctggcccactcccttaccttcgtactgggcatcctgatttctttctggctcattactgccattctgattgcactgaaagcgaacatgtttgactggagcaccccagccggccccggagtgttcagcggagacttctggctgggccgcggcgcggagggcgttgtcaactgggcgttctggtttgaaaacccctggatgaatttctgcctgctgggcctgatgctcgccatggggctgagcatgttcggtgtctttgaaataggcgtcaaagccacgaccatgggcaacgacctccagcaccggaagggttatgccggctccttctggtccggcgccctggctacggtcatctccaccccgtgcagcgctccgttcctgggccaggctatcggcgcggccatgctccagccgccgctgagcattgtgctctgcctgaccatgatggggcttggaatgtcccttccctacatcattctgggagcctttcccgtcctgaccagatacctgcccaaacccggcgcatggatggaatccttcaagcagtccatgtccttcctgatgttcggcaccgccgcctacttcctctggatttacatggccttctttgatgctgaaaaccatcctcaggacatcctgttcctcttcttcgggcttgtgctgttttccatggccttttgggtatacggcagatggtgccccatgtaccgcagcagaaagtcccgcatcacgggaggcgtcttctccgtaatcttcctgctggccggcctgtactacatgctcccgccggaaggagcagcctggttcggccgcggttccgcccccggggcggcggagtcctccgctgccgcagcaccctcccttcaggaggaaggaaacatctggataccctggagcccggaagccatgcaggccgccctggacggggggaaacccgtttatgtggacttcacggcccgctggtgctccacctgccaggtcaacaaggcctcctatacggatgaagtgctggccgctttcaaaaaatatggcatcgtcatgatgaaggcggacaagacccgcacgaaccccgccattgaccaggaacttaaaaacctggggcgcacggccgttcccgtcaatgccctgtatcttcccggcagaaaaccagccgtcaccagggaactcctgtccccggcctacctgctggaattcctggaaaaggaaatggaacgctaggacatcttgtcatgcgggcggcaatccgccgccctccctccaggccatgccgggcagcaggaaaacggggaaagcttacccttccccgttcaacagcggcagcaacgcgtccgcccatgcctgataacccttctccgttaaatggacatgatccttgaacatgccctccctgaacgtcccgtccggcttcagcaggctgccgttaatggataaaatagtggtcctcggaagctcaagcctgcgcagcaaacggttaatctcctcctgcctcctgcgcaacgggctatcgggatcggggccgtagggagtcacctccatcaggatcaaacgggtctccggaaatctcttcagcaggcgtacggctatctcccggatgcccttcaccgtctgctccgcgggctgcctccctttccacaggccgatattattcgtcccggccagcaaaatgcaatagcgcggagaagtcctgactgccagttccgtatcttccatgcgccacagcatgctgtccgtcctgtccccgctcactccgaagttgaccgccttcatcggcacgaacagcctcttccacagcgcggctccttcccgttcccagcattctgtaatggaatcccccacgaacagaatgccgcattccttccccagcaaattttcccggaccgccttgtaacgggccggaacccacggctgggtattcagtttgggaacatcgggcggatccggaacctcatctgaaggtgccgcatacacggcagaagaagcaagggacagcaataaaaaagcggcggaaaaaacagaagcattcatctttttccgaatacgcggcccggaaaagcattctttcccctgccgggaaaatcatgttctcaccgccttgcccaatacctccaggggctggccggacaaattcaattcctttaccagaaaacggacaatcagcaggcttgccagcgcatcatacaaagcgtcatgccaccggcgcgaaggaagcagagcctccacggaacaagtcagccccagggcgccgcacaaagaagacagggaataatccgccagaccgggaacgcacatccggcccagggccagcgtatccagccacgggccgaagccgtggcccggaaaccggcgcaggaacttccgttccgtggccggattatgccccaccaccacggactgccccagccgggaacgtatctccggccacagggagggaaaagacggggcatccgccagcatctccgtagtaatgccgtgcacctgggaggcggaccataaaaccggcttctccaccgcaatataggaagtccataactcaggctcgtcctccaggcggggacatgcggctatgcctatctggacgggctggtccgtctccccccgggccgctccggcggattcaaaatcaatggcggcgaaatgcaggccgccgattgtatccgaaagcagaggcatatcagaacaactccagctgagcatattccccggcaggcatatcgtcttccatatccgtattcttggctctcggttccgccagccgggagcgctccttcctccgggggcgcgtagaattcatctccagatgggacaggatggccttggcgcggtccacaatgacggcaggcatgccggccagtcgggccacctggatgccgtaggacttatccgccgcccccggcacgatcttgcgcagaaacacgatttcctccttccactcgcgcacggccacattgtaattctgcacgccctgcctggaattggccaaatccgtcagctcatgataatgcgtggcgaacagggtgcgggacttcaactcgtcatgcaggtactccgccacggcccaggcaatggaaagcccgtcaaaagtggccgtgcctcgcccgatttcatccagaataatcagggagcgctccgtggcattattcagaatcagggaggtttcgctcatctccaccataaaggtggactggccgcgcgccaggtcgtcgctggctcccacgcggcagaaaatgcggtccaccaaaccgatatgggcggactccgcaagcacatacgctccaatctgggccatcagcgtaatcagggccacctggcggatataggtgctcttgcccgccatattgggcccggtcagcagaataaggcggttttcctccggttccagaaaagcgtcattgggaacgaacacatcgccggaaacattctgctcaataacgggatgacggccattgacaatacgcagggtcatggaattgtccagaacggggcggcaataccggtactgctgggccccctccgccagccccagcagcacgtccaggtccgccatggcatccgccgtaatctggatatcgtcaatgtggcgccccacttcctcgcgcaacaggaggaactgctcatactccacctggcgggaacgctcgtccgcccccaggatggtattctccatctgcttgagttccggggtaataaagcgctccgcattcaccagcgtctgcttgcgctggtaatccgggggcactttatcgtaatggctcttcgttacttcaatgtaatagccgaagacgttattgaagcggattttcagggaatcaattcccgtgcgcttgcgctccttctcctgcagccgtgccagccactccttcccgtcgcgggaagccagacgcaattcatccagaccggcatggtacccttccctgatgatgcctccctccttgatggtcacgggaggttcatccaccagagcgcgctggagcaaatccaccagctcatcaaagcagcccatgcgggaacggatgctctccagcatgtccccgccgccgggcagggattccagatcatccctgagcgcgggaatgcgcgccagggaggaagccagcgcctggaggtcgcgggcattcccggcgccctgggaaatgcgccccgtcagccgctccatgtcccgcacattcttcaggctctccctcagcttgctcatcaggtagggttcctgaagcagaacggcgatcacctcctgcctcgccaggagcttttccagatcgcacagagggtggagcagccagtcccggagtttgcgcgcgcccatgggtgtgctcgtcctgtccagggtccccagcagggaaagcttcacgccgccgcgggaatccaccaggtccagattcctctggctggcctggtcaatcagcacggcgttctccgtggcgcgcacggaaatgcggcgcaagtggtccgtggggcggcggagctggtagcccagataatggagcaccgcgccggatgcccccagggcggcggtcatctccccgcagccgaaaccgtccagggaatgcacccggaaatggttcagcaaattgggaatggccgtggaaggcagaaaagtatatccgtcgtaataaagcgtggggtgggttccggggaagcagtccgtctgctcgtcgctgaccaggagttcggagggattgatgcgggacagctcgtccagaagcaaatccatgtgttcgaactgggccacggaaaattcccccgtggtatggtccacgcatgccaggccgaagcgcttcttgtccttgtacaacgccacaatgtaattatggcgggaggaatccagcaaattcatatccgccagggttccggcggaaatcacgcgggtcagttcccgctccaccagcttgcccggctgcggaatggtggtctgctccgcaatagccacccgctttcctcccttcaccagccgtccgatatacccttccgcgctgtggtggggcaccccgcacatgggaataccgtggcgcttggtcagcgtcaggcccaaaatggcggaggcctccttggcgtcctcaaaaaacatttcgtaaaaatcccccagccggaaaaacagcagcacgtcttccggcaagcccttcttcatgcgaaggtactgatccatcatcggggttgaggcaggtccggaactactcataaataacggtgaaagagtaatccgattgcggcttcaaggcaaggttggaatcttgttagaaccggggctccactccccttttccaaggaaaagccagggaagaatcatccaaagccccgcaaagaaaatgcgttgcctctgccattatcgcgtcttttctcttcctctccggaaacaggccctcatgcggaagaacccggccatgcagactgccatctttttgcgaagcgcggcaaacaacaggccatttattccagaaaagaaaaaaccgtgccgcaaccggatgcggcacggtgtgaagtcagattggaggaattaatattccaccacgggggcatccttccacagggtgtccataccgtagaattcgcgcgtttcctgccccatgatgtgaaccatcacgtcaatgtagtccactacggaccacaatgccacaggcgtatcttccacataggtggggagggctcccgccttttcccgaacggcttcttccagctcccggatgacggctcgcagatgggggacggacaaccccgtgcacactaccatgaaatccgtcagggaagacatgccccgcaagtcgtacacccgcacattttcggccttggcgtcatccgcggcgcgggcgcacatcctggccagttccatcgcatcgttggctaccatattcgattcgtttctattgaattatttcttttctccgccgtccttgccgaactcatcaacgggattgtaggagaaggggtcccgttccgcctgttccagttccccttccatcttccgttcttcagcgccgtccgcgcgggtctcttcagcttctttcttctcggtatggccggaatcatccttcccgggctgttcctccacttcggaaggcatggggggcggagtcaccctggagggagggtttttcatttccccgtattccagaatatccatgacctgggaaccttccagcgtttcaaactccatcagggcctccgtcagaatgtccagcttgtcccggttttccgtcaggatggccatggcgcgttcataagcgctgtccaccaggaagcggacttccgagtcaatcagctccgccgtggattcggaataattgcgggaacgcgtccccaggtcgcgggcaatataaacttctccctggtgttctccgtactcaatcagccccagtttttcgctcatgccgaattcgcacaccatgcgccgcgccaggttggtggcgctcttgatgtctccggtagcaccgctggtcacatcaccaaaaacgatttgttcggcgcagcgcccgcccatcgccacgacgagctggtccagcatttcggaccggagctggtgcatcttgtcgtcggaaggaagccacatggtcatgccgagggccccgccgcggggaacaatggtcacccggtgcagcggctcgctgtgcggtgttttcaacaggcagatggcatgccccgcctcatgcacggcggtaatgcggcgcccccgttcgttaatcgccaggctgcggcgttcacgcccccagctgaccttgtcgcgggcttcttccaattcggcctccgtaatctccttcagacccttgcgggcggccaacagggcggcttcattgaccaggttggccagctgggcaccggaaaagccggacgtgccgcgggcaatccgctcaaagctgactccgggcgccatcttcacttttctggcatgcacctgcaggatctgttcgcgcccccggacgtccggcaggttcaccaccacctgccggtcgaagcggccgggacgcagcagggccgggtccaggatgtccgcacggttggtggcggcaatcacgattacattggagttgttttcaaaaccgtccatctccaccagcagggcgttcagcgtttgttcccgctcgtcattgccgccgcccatgccgtaaccgcgctggcggcccacggcgtcaatttcatcaatgaaaatcaggctgggcgccgtccttttggcctgttcaaacatatcgcggacacggcttgcacccacccccacgaacatttccacaaagtccgagccgctgatggaatagaaggaagcgttggactccccggcaatggcacgcgccagcagagtcttgcccgtaccgggcgccccgaccatcagcacgccgcggggaatagtggcgcccagatcgcggaatttttccggattgcgcaggaactccaccagttcccacacttcctccttggcttcgctgatgccggccacatccttgaacgtcaccttgttcttgtccggggagatgaggcgcgcccggcttttgccgaagctcatggccccccgggccccgccgctctgcgcgcggaacatgaagaacagaatcaccagaatgagcacgatgggcagcagattcagcaggatgccgccccaggaaccggattcacgcttgaacttcgtatccggccccagaagctgcttgacgcggtctccctggaactccagggtaaaaggcacttccacacgttcaaaacgctgcttgtccacggaggcgtctcccgtagccgcgggccagatgcgggtgacaatctgtccgaccagcacgttctggttgccgtcttccgccaggatgatgccgtcctttcctccggcgatgcggccttccagggccaggcggttgaattcaggcacggaaagcttctgggctccctcaggaatgagggaaacattctttccctcttccgtccggtacgggctctccaccaccctgtagccggaaagttcattcagcaaaggcttgtcgcggtccggaagggacatggaataagtcagcgcaaagggggttatttccaccttcggctgaatttccttcctgtacaccagcgcgtgaataacgccttcggaaccgttttcgctcagcaccacttccacgggggccttggggtcgttcagcaccacgcgccccgccttatactgggcttcaaaggattccagattttccttgcgggggcccaacccgaaagattcaggggtgaaaaagccaaacgcaaggacgcctacaatgagaagtaccatgacccacacgccccagttgggggattcgggcctgccggagccgggaaatttgggaggacggggaggactgggtggcattctgtcagacataatgtggttagcacacagaagttaatgaatagggcggcatgatacgcgagtccttgtaaaataaaacttttttccgagacatgccatacagccgccgcaggacgggcccgcaccgttccgggccggggctcttcccggcaataaggccttaaccggcgcaggcctcattcccgctttctttttctgcgccgcccctcatggttcgcgctttctccgttcatgcgctgccggagacgccgcttccactggggcatcctttcttccgccggggccgcatgggaaccggcatcttcccggctcttttcctgccaggccccctcctcctgcgcgttcagccgctcccgccgcctctgctcctggatttccgccaattttctggcgcggcggatttccacccgcttgctcacctccccgtgggcggaggtcacgcgccaggggccgatgcggcggggataggtaatgggtgcgcaaaccagttccgcatccagaaaacgcatggaccccaccagcaggttcttgacattcgccagcaggccgccgtccgtccagacgccgcccatgcccatttccagcagaaaagccagatgcagcgtctccgctcccgaggcctgaatggaaaaatccctcagggaaatgccctccgccggctcctcgtccggagcggccacggaagcggcccggaggaggaacatcgtatcccgaaccttgcggctcagggcgcagaccagttcccccaccttgggccgggcgtcaaaacggtaatccttcacttccaccagccacagatcccggcgttccggatgatacagcagaaaatccatttccttgcatcccccgcagaaattctgcgcctgccgggcataataatccgaacattcaatgcggcacaccacgtagccttcatcgatccagaaacggtggacaccctccacgtaataagcttttgacggcttatgactcataactcagcttcaaatacctgtccgcctgttcgatttccgcttcaagagactcgacaggtcccacgtcctccagggattccccccaggacacccttaccccggaacgttccccccgcggcacgctcatcccgaaaaactttctctgcaccatggcattgcggggttcggaaagctgaatcatcagctcccgcagcaggaacaggctgtgggaggacaaaataacctgcacccccgtcttggcaagccccgtcagggttttcaccagcacgggcaggtgggaggcgttcagattcatttccggttcatcccaaaacaggacggaaccttttttcacggaaccgttccggatcaggtagctcagcgttcccagccttttgaatccttccgccaccaggctcatttctatcggctgctgtccgggacgctgcaaaaagaaccgcccgtcacgcttcaccaccttccccccgatgattttttccagcctggtaaccacgcgcccggcatccgtactgatgggctccgcttccgcctccatatccagataacggcagaggtcccaactgccgccgtccagaaattcggggaatctgcttcccacctgcacaaaactcggataaatggtcagcacctcccgcgctgccaggaacaccaccggcacgttcagaaaacgccggggcatttcccggatgctcagcccctcctcttcatgccccgcctggaaatcaaacaccaggttccccatgccctccggcacgccgtccccctccatggaggcctccacgcgcgcatgggcgtttccccggttccgggccgtcagcccggccagcccgcgggacgcgaacacccgcatcaggtcttttctgagccgctgctcctccgcccatttttccggcagggattttctccccccgtcagcgctccacttggccacggtatagcataatttcagcaaatggcttttgccggaatcattgcctcccaccaccacattgattcccggaacaaactcaaaatgctctctcccgggaaacaccgtcacgccgctcaccagtaggtcatgtatcataccgttcccaatgtagcacagaagcgcaggccgtaaatgacaaaagccgccagctgcttaccaccggggagcctgccggaaaaacaccggaaacaacggggaaaacgcatacggccgcagcaccgccccatcccccgcaggtaccggacatacccggaaggcggcgcattttaggcttcccattgccgggcgccttattaaagtaatccgtatgagcgcacaatggaccaccgccagggaatacacggacatcaagtatgaaacaacggacaacggcagcatcgcaaaaatcacgatcaaccgcccccacgtccgcaatgcgttccgtcccctgaccgtgcatgaaatgctcaacgccctgaacgccgctcatgaagaccccaaggtgggcgtggtcatcctgaccggggaaggcccggacgctttctgctccggaggcgaccagaaagtgcgcggaaatgccggctacatcggtgaagacggcgtgccgcgcctgaacattctggacgtgcagcgcaccatccgcaccatgcccaagcccgtcgtcgccatggtggccggatacgccatcggcggaggtcacgtcctccacgtcgtctgtgacctcaccattgccgcggacaacgccaaattcggacagacagggcccaaagtgggctcttttgacggaggcctcggctcctcctacctggcgcgcatcgtgggccagaaaaaagcgcgggaaatctggtacctgtgcaggcagtacgatgcccggcaggcgctggacatgggcctggtcaataccgtggttcccctggaggacctggaggaggaaacgctctcctggtgccgccagatgctccgccacagccctctggccctgcgctgcctgaaggcatccctgaacgccgactgcgacgggcagatgggcctgctggacctggcaagcaacgccaccctgctctattatatgagcgaggaagcgaaggaaggcaaaaacgccttcgttgaaaaacgcgctccggatttttccaaattccccagacttccgtaacctccccctcctccgcaccatggcacccagctccgacaatgaaggcgccccccggaacggcaccgctagcagggaatccctgcgcgacctgccggaacatgaaaacatcgtggagcatttctacgatccggaagatcagggctcccgggaaaaacccgtccgtgaaaaaacgcctttctccctgataggcaatctcatcttcctgctgaccatagccattctggccgctattgcctggctggtttactcctcctggtgcccgcagaaaacggacgacctacccggcttccgccaaagggaaaacgccccggatatccccagaatcctgaaacaggccatcaacagggacgcctccgtctcgttctcggaagaagacatcaaccgctacctggcttcctccatccatccccagcagcacggcgccctggccatcttcgccaccaacccggcggctggcatccgtctgcacggcggcaaggaacggccggacggaaccatcggggaaggatacatggaaatcatcatcgaacgctatacgggcatcgactcccgccagacgatttccctgttcctgacgcccttccaatccctggacccgcacaattacatggcggtgcagacccgcttcgaattctacaatgacgaaacgctgccgggaggaatccacgtggggggcaccatcggcagcctttccgttccccagggttacatgatttttctcctgcccgcgtttgaaaacctgctccaggcctacctgccgcttatccacatgattgaagaaagcggcatgggcatccatatcagtgaaggcaggctgaacctgacgcctccgcaaaagcgcacgctgtagcggaagaccgcagggccttccgcaatcaccggatgccctgccgggcaatgcccccttccggccccggcattcaatttttctccagatccctgaccatcaaagtcatatactcctcaggccaggaatgtgtaatctgacccgcatcattgaaaaccgccaccaggcggatggaatccctcccatctgaaagcaccagcacggtttcatccttttcaaaatcataacggggcttgcccaatttgaatgccgcactcctgcggtccgtcctcagccacgcgcgagcctgctccatcgtcaggccacgcagcgcccgggcatccctgaaaacgcgccgcgccgcattcatcgccgcagggctggaaaccaccatgccatcccggaacgggcgggttccccacatgcggtcaatatcccggtccagcgcgccgcccatccccccggaaaggaaaaacacggctgcgggccaagccaggaaaatacccgcagcccatattgccagccgtttgcggcttctggaaagagccgctattccctgggctattttcccccatttttctaccagttcccggtccgcatgcccgaacaggaaattcacctgcctgcgttctatgccgccccgcagttcagccaccgtctttcccttttcgggcgccagatcctccagcgtagggcttccttccacgaagtggcggaaaatcctgggccacagcacgggaataaccgcaaaccggattgcaagcagaaccaggctgcccaccaggcagccgcttatcaacagaatgtcaaacgaacggctgaaaaaatagtccggattccacatccagataaaaggagccgccagatacatccccagggaaaataggcaccatgaccagactatggcggaaaaacggctggccgccacaaccacccccagcaggaacaaaaaggcccccagggcaattccccacggaaacgccccgtaaatggcggccggaaaagccagaatcatcaatgccgtacccgcgggctgccgaactttttgcatatccggaacatagcacaagcccttgaaagcatcaagaaaggaagcccccgcagtcacacagggactgtccatcctcccccgccttacttcagccagccatattccatgatgagggccgcttccacctccgcattcttggaagcttcattatccaggtcagcatacattttcctgatatccttcctctgttccagatattcatctccggaaatggataatctggactccttgaacgcgatttccttcatcagcaccccctgccagagctcaaacctcctgcggctctccagcaacgcggctatcttgatgcgccgtcgctgcagttccatcaccacttcgcgctgcagcagttcgtggctttctttggccgacttatactggaaccaggatgtcaggcgcgtatccagttcttcccgcaggctcatgttcaccttcatatcgcccgctcccgcaaaaaaaccgccgtacgtcccgcccgtgctggaaaacagggttgggctgtaaaaattaatatccacggacgggaagaacttcagtttggcattcagcacctggaggcgggaagcttccagctccatggccaccatcgtcaccaccagcagatccagctgccgggacgccgccctgtacctgccccagtccagcctgggcatcgtttcagggttcaccagccaccgggcgtccatattccccagcaacacggcaaacccctgggaaatctcattcaaatcccgctcccgttccaggtccagcttctttttctggacgccatcatcgtcataaggcagggagctcagctggttattgtagctgatctgcgcgttccggtaggaaagcacctgctggtacaatctggccaccagctccctttttttcatctccagcgtcttttccgccgtataaacagccgccttggcggaataataatcaaacgggatctgggtgagggacggcatgttgaacagaatgttcgtattgtattccacatcgtcggccgacaccttggccaggtcgctcaattccttggtcagcatccagtccagattgactccggggataatctgggtaaaaacattaacgacggaacgtttcgtcgtcttgagggactgctccgattttttcaagtcaatgttccgctccatcatcatcgccagggcctggtgccatgagatttccttccgcggcagctgccgccaatcgggaacggcatccatcctggccatcaattcccccgcctttttttccatgtgcctgtccacggagcaggaggcgcataccgccgtacagaggcagaagcacaacgcagccctcagccatgccctttcaaacagggaaaacaggaaagaacggacaacaggaggaaacgggaacatacaggccccttgttacatagcttctgcccctgaaaagtcaagcatcaacacggcaggaggggaaagaaggaaaaagaagtcctggagcgcaggaaattcggtttttcctttccccgtgtaaaaaatacctccctcctgattcctatcttgacaaatcatgtgtgatatcacagtttatcggaaaattattatccttttatgatgcgtccttttcttacctctttgtccgcggcctgctgctccctcggcattcttacgctggcccaatgcggcggaagcagttccgatgccgaaggcctggcgccctccaccatcggcagcaaggtgttaaacatgcaggtaacaggcattacggatgccgccataacgcttcccgccatttttgacatgaccaccggtgacaacggggcattcatcatccagacgcaaggggaaaacatgaacatgtggaacggggcaggcatttattcctacaccaaaaccgggaaaaacactgcggagctgagcctgtcctacaacagaaacagcggttcgtcctcggaacccaacaccctcatgagcaccatcaggattccccagttaacctttgagaacgccacccatgcttcttccggggaaggcggcgccagcatttcctacatgcaagcggaagacaggacacccatccccatcgacggcatcaccatcagcgtcaacatcatatcccagtcataaacaaattctttcctttatccatcaaatcatgaattcccgcctttatattcccgctttaattactctcgggcttgggctcctctccggctgcggcggatccagttccagcgaacaggcctatcttcccattggtcttcagcgcacgttggacatcacgcttcaggacggcaagccttacgtcttctccttcatcatcgcctcagaaagcaccgccaccatttacaccggaaccagcccggccgcctcaacggcatcccttcatgtcgtcaactacaaaccagcttccgactctgcggaacagataggcttttactggtcgtccaatgacggggaaacaaccagcaatctggatgccctcgttgtcctgtataatccccagaatatttccaaaggcatcggttctgccacctgcagcgtcagagacgccgaatatactgaaacggaaacccagcaggataactgccaggcggtcatcagggatttcagagtgcctcccagctctgatcaataagccctttcttcctacctcccttcccgcccccatggcgggaagggatttttttatccattatctcttcctgccggaacagagacggcctttcccccagaccgccggcaaaggcggacatgccggaacgcagacaaaaccgggaacagccccgaagccccatcacttacttaagcactttccctatggggcggcaggcggaaaaggcaaccggaatggaggaaagaagaacacaccccgccagggaaattcccagcagccacaaatcctgccgtatatcggcataagtcaggacggagtttcccagcttaaagaattcccccaatacgattctctgggttttcatgaacgcccagacggctcccgcaaaggaaacgccaatcagaaacgcgttttccacgataaacgccataatcagcagtacaggacgcaccccgaagctcttcatcagcgtatagacatattcattctgacggaattccatggatgccagggctgtaagcagaatgccgacgatcacggcgatgccgagggaaaacccagtcctgcactccgtctggttgcccatcagcacttccagcctgtcaagcagccctacgtgagtctgaaccatggtcatgctgccgtcataacgaaccatgttgttcagcacttcttctatgctccgaatgcgggccgccgtcatttcatgcacccggatgatgtagcggcaattttccacggggacctcctgcccggaactgaaagttccttccggggccaaaatgactccggaaggatacagcctgcccagcaaatgcccctccggcagaggggaggcattcagggaaaaatcaaaatccgctatggtaaccgtacaaggccccgcctgcaacggactccgggagggattgtacagaaggacggtagccacgtcctccaacccaagcgaggaaagaaaggaacaggactccatgttgtattccaggatggggaatactgtcttgcccacgcgcgccacgcccgcacgggcatcattcagcaccaggacatcgcagccatacagggaaggcagttcatgctgcagcaaatttttcttggaaggctccccgtcgcgcacggtatcaaaaacaataatcaggtccgccccgttcttcctgatttcatcatgcagcattttggcggagaggacataattggcgagaaaagagagagcgcacagggaaaggaagaaggccaccagaatccgtgaaagggggctggccgggcgttccttccaacggtggagagtatctttaaagagatacaaacaggttaaaatcaatgatttcatgggtcaggtcaaacagccgggaatcatgcgtgctcaaaatgcaaattttgtcagcagggtactccctgatcaaatttttaatgatttccgtattaccgtcatccaggccggaagtaggttcatccagcagcagcacatcggaatccttcatcatcgtgcgggcaagagccgcccgctgggcctggccgccggacaagctccccgcctttttatgcctcagagattccaggcccaggcgggcaatcaaatcatccgccctccgcgtccactgctttttaggcagcatggccatttccgcgcataattgaaggtttctctccaccgtagccaggggaaggagattgagcccctggaacatgtaacttacctccttgcgtcggtagagggaatccgcctgaaccttacggcggggggtaatcacgcgcccgcgctgcgggctcagataacccgccagaatctttaacagcgtcgttttcccgcatccggaataccccttcaaaatggtgattccggaagtgaacaccctgttgtaattttcaaaaatccactgcttgcctgaataactgaaacagactgattcgcacagcaatttcatttttttcgaacaatcaattccgtttccccattcaccaccagctccaggtccggatgcactttttcaagaagttcctgccaggacgaacatttttttccctccggcagggaagccagcctcaccttgttgagatgaaacacttctccctgcggcatgtaataaagacgggccgtgcagttggaacccagcatagaatgggcgcgcgcatgctcctgacggggcagacggaaaaaatacgccagcaattccccgccgccggaaacattcttctccacccgcttgaaggcaaaagcccccttcagggcggaaccgtcgcccagagggacggacagggaaagggattccggcggcagattcgtcaaatcagggtctgatatggaaatggtcagataataagaggagtcatcgcacacggtcgcaatcggggacgcggcgtccatgtaaagggctacgctgttatccggcggaatggaaaactggtactgcagcttcccgtcaaaaggcattctgaggatatatttttcctccttcttgcgaaaatccagacgcggcttgtcctccaccagggacaactcccttttggaaagctcaatcttgtctttcaaagcccggatggccctttccccgccttccgcccgcttgctggcatattgccgttcctccctcgacagggaagagtagaattctatctcttcaagctgtttttccagctttgacaactcttcctccttggcgatgcggtccttcaggattttgacctccagctccttgcgctccagctcaatttcatcttcattgaccgttgcaataatggtatccttctgaacacgcccgtccgcgggaatccagttgctgacaactccatcggccggcatgacaaaggagcgcagcctttccgggacgatcttggcgcggaaagtcttgatgaaacaggcatctttcgatgccgccataccagcccccccgccgaccgattccgcattccagacacaaagaaccagccccgagcacagccagatgccccaaagacatttctttgcccttccgaccataatttcaaacaggcctgcccccccgtttcacggcagcaaagccccgtcataaatgatcagaactcaggataccgtgtaactcaccgttccttccgtagcggtccagtcctgcgcttcatcctcgccttcatcattctcaacgggaacctggtaagtgatggaaccggtgaacgtcccgccgcagctctcacgttcattggaggaactgaaggaaatattagcatctataaaggccttgtccctgtttgtcacgacaatcgggcccggagccgtccactgcccggaagtaatcgtgaagttccccctcagaatagcggatgagcccgtcctgcggtacactacggaagcaatgttcataggagcactttcattgctgcttgccgcattaatgcttacctggggaaggtccgaaccattgcccgtcaatttgacgataatattccacggccctagcccatcttccgtggaaagagaagcgctcaagtccagcatggtgccggaaggaaggctttccccgtcaccgctgctgccgctgcctccgcaggaaaagagtccaagggacaaggctgccgcggaaagggaagataatacgcacctgttcgtcaatcgggaaaacataaagaaaaagattttcttcaaggatagtgattccgtccggcgcgtcaacacataaataaaagaatatttggaggggccttccgttgttttgcgggatgcaccggggcttacggcccgctgccattccccggacgcgcacgccggattttccgctttgcggcggaaaatccagacgccaatccccgcaggccgcaaacgtcatccggccttttccagcctgcgcttgaggacgcggcccgtgaccagcaggggggcagcccccatcaggaacaggaacagggaatccttccatggggtgggaaccgttccgtcatccgcgctgtatccggaatcccccggggacaggccggagcctccccagggcagaggctggcggcgggccaggaaaatttccggcctgtccagggcatcccggctgacgcgctggatttcggcggattcgtccagcatcacaacacggtcattgacatagaaggatttgacggacggacggcccttgcccaggagttccaattccgcaatggtccgcctgtagcttttttccgaaccgccaagggcggccctccgcacctgccggacagcggctttagcctgttccgggccgtccgctccaatagccgcaatgtggagcagcgccatcttgagcagcttgaattcttcaaattccctgtcgtccagatgaaggcggcccttcaggtcgtccactttctcctggatggtttcacgctccctctcccatacatttttggacgcctggtccaccaccatcgtttcaaaggagtagcgcaaggggcagaattccgccaccagcggcacgcgccccggcttgaggcgcccgtgttcatccgtacggtgggcggaccatgggatgaactggttcatttcatcaaagcggacaatggctccggccatcaatatctggggaatcagaagcagaggcaccatgttaagcgccgccctctccgttctggcgaatacggaaaccagcagggacaggctcacgccgacaaaggccgtcagggccatcgtccccaggtaaatcaggaacattccatggatttccagaatggagttccccacccacaggaacagggcggactgcacggcggagagccccgtcagcaccagcgccttcgccagcacataaccggtcacgaataccttggcattgctctccctcttgagcagggcacggtccttgagcacttcgctggccgccccggtcaggccgaagaacatggccacaatggtcgccaggaacaggtaggaagggatgtggagggccgtggcaaacgtatattccgggctggaagaggcgcgcagggtcacggaaatcagcagggccagaaccggcccttccagcagcatggtgtacagccccatacggctccgcacgcgccccaggaaggtgcgcacggcccagatgcggaaaagccgccagagctgtatgacgctgcgcctgggggcagggggaaatcccagcgtgccttcatacagcgttctgggggcgcccccttcatgatgatgccccatcacgttgcggaaccggtagccttcaaagcgctcctgccacaggcgggggtgctgccgcctgcggcggtcgtgccaggagaggggggcttccagcacctcaaacacgtagtccgcgcctccggccgttcgagcctcctcggatacgtcaatagccatgtccgctgccgccttccggaaataccgcatcatgcccggcacgtccccccagtaagccatctggccgccgtggtccagcaccagcactttgtggaactggttcagaatagccgtgctgggccggtgcatggtggcgattaccattttgtcgcggctcatgttctgcatggtctgcatgaccagcttggcatctgacgtggacaggccgctgataggttcgtccagcaggaaaacatccgcaatgcccgccaggtcaagccccaggttcaggcgcgtgcgctccccgtcggaaatggtgcgggcgttcatctcacccacgcggcgggaggcgatgtgcgtcaggcccagaaatttcaaaatagcgttcacgcgcctgacgcgttccgaccggttcagccgcggacggcgtatcatggtggcctgagagatgtgctcggaaacgctcatggccgcatccagaatatcttcccggggaatgaaggcgatgtagggccggataagatccggggcgctgtacagaagctggttgttgtaacggatgcagccccgggtaggcggcagctggctgaccaacatggagagcagcgtgcttttcccggatccgctgggccccaggatgcacaccatttccccgcgtttcacggtcaagtcaatattgtccagcacgcgcccggagcgcaggaattccttggtcactccttccacgctgagggttctgatcgcatggtattcttcatccagcaccccggcggaaaaacggcagcgcagcgcgtggtaggcattcaggtgcaccacgtccccatccctcagggaaacccttccccgaacaggccggccattgagcagcaggggcatggaggcctccaccacttccagccatccggaattggtggcgctggaaaaagaaacctcaagcaccgcaccgggggccagcccgggagtcagcagcatgtctcccttgcgcgccttttccggcaggttggtcacccgcagcttgcggtttccgggatccaggcggaaacggcgcccgatgtccgacatggaattctgcacctcacccatggagaaaggcccttccccgtccagcgtgaaggaggagtaataggccatgcgcacgctttcaccggggtacagccgtctcccgtcaaccgcgaattccacttccggcctcagcacctccacctcgcacgccagccccatgttcacgcgcacctcgctggcgcgggaacgcacccggctgatttgtagggagccgccgtccagggaaatatagcatacttcctgcttgcctgaacgcttgcagtccagaaaaaacgcgaagtcttcaaaactcagcggaccggacggcagcagcaccacctgcccgttggtcagcggcatcaccccgccgggctgcaaatggcgcccgcgcaccacaatgggacgggtgccgtcattcaccaccagcaccaggcgggaacaccggatcaggcggaaggaaatgcccttgtcctgctccggaagggatacctccgcaccgatgccggaggaaaaaccgacgctgtacgccggttcctgggcttccacgtccggcgtcatcagcagctgcctcaggtggtttgccgtgcccggcagttccagaccgtacgtcacctggtcaaacagctcccctgtcatgcgggaatctcccgtattgatcagcagggaaagcacttccagagctatcgccatgcgttccgtctcatctctgccggaagctgcggaggccaggacatccgcaaccgtcaggctggccctcatggaccgctcaaaacggttggaaagccagcggtgctccacttccgggaaagtatagcgcagaatatccagggcggcgtccgcatcacgggcgctcaaatggcggcgtccgcttaaaatagtggcgaacaagtccaccagcgttccggcatgcaccttcatggagccgtcgtcacggcgcagccacggcacgtaggcgcccagcgccctgaccagattcagcctccagtgaatcagcttggaaggaatgtcaaaaaaccattggatcatgcccggaaacgcgttgccggaacagtagtacagggattcccgccccatctcaagcgcaaccggaatttcacggagaaatgacaatattttctacagctttatcttgcaatagctccggaggaagtatagttctgtccaatgttcatgctttccgcgtgaaagctagccaaatacatcaacattatcacaacatggatattttagtttctactctttgtgacttcgccgccgactaccagggcaagctctgcatccagggcggctttgactccctggtcgcccgccagttcccggtcgtgcatcccgtctgcgccgttgctctgcgcatctgcctcactcctgaagacgaaggcacgcacgaactgggcctgagcatcgttgatgccgacggcacgccgctggacaaggaacgcatgcccatcaagatcaatttcccggttcccgctttcccggaaggagcctctttcttcacccgcaacctgatcatgaacttccagggcctgcgttttgaaaaaccgggcaactactccatcgacctgacagttgacggcgaactcgcctctcgcgtacccttccgcgtagtgcaggtgcaggaagaagccgcccaggcctaagaaaccatcccctcttccatcaaaccgcctcccgttcatccggcaggcggttttttattggcgcggccgtccgcccggaagtgcggaacaggccggccccggttccatgcacctgaaaacctctgcgcctggccccggcctaaaaaagggagaccggctttttgcgtcctccttccccctttttcattgcggttccgcaccggattgaccatgatacgggctgctccaacccgccatgcacaccgcacgcctccaatacgacaggattatcattacgggcgcatcatccggcttcggggaagcgtttgccggaacgctggccccccatacggcggaattggtgctcatcgcccggaatgaagccgccctgcgccagcttgccgctgccctggaaaaacgccattcaggccttcacgcctccgtccttccctgcgacctggcggacgaagcctccctgaatatgctcatttcccgcctggacagccttcctccgggaagaacccttctgattaacaacgccggtgccggtgattacggagatttctcggacggccgctgggaaaaaattcgttttctgctgcgcctgaacgtggaaagcctcacccgcctgtgccatgcgctggtcccctccatgaagaggaacggaggagatatcatcaacctcagctccctgggagccctcctgcccattccggattttgccgtttatgcggccaccaaggcttatgtttccagcctgtcggaagcgctgcggctggaactgcgcgaacacggcatacgcgtgctggtcgtctgcccgggcccggtttccacgggtttcggaaaagcggcgcaccgccccggctttaccggaaacatgatgccggggcgcaacgcttttgacacgtccgttgaaaccgtcgtgaaagacagcctccgtgccctggcccgcggacgcgcccgggtctttcccggcatgaaaatacgactggccgccatgctgctggccgccgcccctctggggctgatacgccttttcatgggcaggcgcccccggaaagtcctgccggtatccaatgattctccttcttcagcatcatgaaagcgcaccgccgcagaataccccgcctcacctggttcaagctcgcagtctgcatctgcctggcagccatggcagcctccctgttcacgccgtaccccgcccagatcatacgcgccctgaaaggggcgccggaacaggcgccgccggattccggaacctgtccgccccagaaatccccccccacggaacaacacggacaggaagaacagccaataaccgctgcaccatccgcctccggaaaggaacccggggatgaacggctgtacactccatggacgccggagcgcacaatcgccctccccccggtgcagtaccccccatttccccccgtgcttcccacaaggcccgcggaaggggccatgacccatatttatgaactggcccgcggcctgaacctgaaaacgcaggttaatttccagcccggcaccctggcctccagggacagggaaaccaaaagcaattaccagatgaccctttccctgaacgtcaaacagcccaaagcattgacgaaaaaggaagatatgctgaagctcaatccgaaactggaacccatgcttcccggcctgtccaccctgttcaggcatgcgcgcgtctccccttactacgggcagatttacgtccgcaaacagacggaaatccgtaaaaacctggcctccctgctcaaacttctggaccgccataattattacgatacggagacgattctggaaaccacctatccggacacgggaaggaagcttctctggctgcaaagtgaaatggatgttgtttccgacggctcggacggggaccggctggccgccatgccggataaaatcctgaaaagctccttctatcagcccagcacttcctaccgctggaaaaagcgcacagacaagcccaatcccctgctcaaaccctggcagcagaggctggcttcctacaagaagacgctggaaaaagcccccgccgcggaaaaaacggctctgcgccgcaaaatagaccatgcggaacgggtcattgaggaactgaagcggtacagcttcctgatctcggaatacgatccgttcatcgtggttccgctgggagtcgtcaaccagtccactcccttctccccgcagttcggggactatgccgtcgtcatcgtaggagacaagttgtacccggccctggtgggagacgccgggccgcgctacaaaaccggggagggttccctgcgcctgagccgtgaaatcaaccccaaggcgggcccttacagccgccccgtctccgacctgaaggtaagttacctgattttccccggttccgcagagcccgaggccgggcctcccgactatgaaaaaattacggacagatgccgggaacttctcaacgaaataggcggcgtggggaaaggattcaacctccaccagtgggaagacctgctggcgcccaagccaccgcccgccccaaaaccggaaagcggcggcacagcggaaacacctgcagataagcggaaaaaggaggaagcccccggaaacaagcctgcccctgccccggctccgccggcttccccgcaaactgctccggcttcatcagccgcaaaaagcgccgcataagctacagagcctctttccaagaaaaaagaaaggctttccacatccgtaaataaacgtctccgcgcgcaatcttcaccttcccggaagatggatgccgccgatccgcccgctggagcagttccagcgtgtccagccccagccaggcgggcaggacggtggaaaaacgcagccgcccgttccgcagagattccgcgtaaaacacgccttccttcagccagcgttccgcgcggtccagccatggacggtcatctggggcaggcaaatagcttcttccgcgggcgaggtcttcctcccggtcacgcaggatattcaccaactgcagccccatgccatagtgcctgccccagcgcaaaagctgctcctccggctgcgtgctgaagcccggcccctgggccagcaagcccagcctggtccagaattcccctacgcatccggccaccatgtaagtataatgttccagttgttccgggcatgagacggcagcatggctttcaaaatacatcaaatcccacgcctgtccctccacgatggaggccagcacctgccgcaccagcatccgttcatgcggggaaaggttttccagcagcgccaggcattcggggaaacgggccagcaattccgcctccccccggtgcgtctggattgtggaaagaacgcccagacggccaaaacaggtggcggcaacctcccgggaggcagagcaagccaccgtctcccccatcatcctcaaaagcgccaggcgctcccggcaatccatgtccacggcatccgccaccgtatccgtggcacgcgccagcagatagcccacggccacgccggggcgcatttcccggggcaggaagcgcatgctcagataaaaggaccgggagacggccgataaaagatggtcaaggcctttcatgatttctgcaggcccagcctgtgcatcttataatggagtacccgcggggaaatgcccagttcccgggccgcggcggacatattgcccggagaacgtttcaatgcggctacaatcaattcccgttcaaaggaatctaccatggtcggcaaatcggcgggagcctccccgtcacgggaataagggacgtcatggctgggcatctggagggaggcgggaaggttgtaaccgtaaatgcagtcgtcctgcgccgtaatgacggcacgttccatgcagttttccagctcccggacgttgccgggccagtggtaagccatgagcatgttgatggcgggggtggacagccgtttgatgtcctttccgtatttcaggttgaacttggaaagaaaatgttccgccagcagcatgacgtcccccttgcgtttggagaggtccggcataacgatggggaaaatgttcaaccggtagtacaagtcttcccggaacttgctcgccgccatcagttcctccagattgcggctggtggcggcgatgaagcgcacgtctgcatgaagctccctgttgcttcccacgcgggaaaaggtcttttcctgaagaaagcgcagcagcttcacctgcatctggaggcttaaatccccgatttcatccagaaacagggtgccgccgtccgccgcctccgcccggccgatgcggcggctggtggccccggtaaaagaacccttttcatgaccgaacagctcgctttccagcaggttctccggcatggccgcacaattcagcgtgaccagcggcttatcctttctgccgctcagattcaccacggcgcgcgccaccagttccttccccgttccggaacttccccgtatcagcaccgtggcatcgctgggcgccacctggcggatctgttcatacacctggagcatagtgctgcaattgccgatcaattcgcctggattagtcgtcaaaagctcccgcagtttttcattttccgcgaccagggcggcacgttcctcatgcgcctggaggctggcagccagagcatccccaacaatattgcctacaatctccaacagtttctgatcccgttccaggtcggtgtcccggtccacggcacggtcaatgctcaacgtgccgatgacctgctgcaaatgaatgatgggaacgcagatgaaggctactttttcaccgcttttgcgcgtgcgggtacggttcaggaacctggaatcccgggaaatatcctcaatcacatggggcctgcccgtttccgccacatgccccgtaatgccttcccccacatggtaatggccgcgtttcatttcctgctcgtccaggccgtgggaggcttcaatcatcaaatcgttcccgcggcggatggtgaacgtgccgcgcagcattttcatgcggcggtaaagcacgtccagaatatgccggagcaaagccgtgccgttgcgttcattgacaatggcggagctgatttctttcagcacgaccatctccaaatccggtgacctgtttatttcattcatgcaatccggggctgggcgaatattaaccgcacgcccccgccataccaactactttttcttccaccgccatgcagccgggcaaaaaaaaacggcacggggaatatggataacatcccagcaattaatgttgatgatattacgaacggggaataaaagatttttacaaaaatgtaatatacatcccttgtttcgttccgttttacatgcccacgtctccgccggactcccgtttcatcatctccgtgataacctggaacaacgcgttgcggtacagcacgccgtccagccgaccggtattcttccagaccacgggaaaggcgggcagatgggtttgttcaaacagcttcaaggcatccgtcagatgggtgccggcgtccagcacgggagcccccgtacgaaccagggacccggcatcggccggaaccgcccccttccgctcctccatctgcaagcgaaccgccagaaagtcctccggatagatggccccttcataaattccatccttattcaccacaaaaaccagatctccgggattccgcagcatcagagaggagacatcatccagggaagcatccggggccacctggggcaccacgtgccgcgccaggtcatgcacatggacttgcgccatgggcaggttgacgacggacgccggactgccagccaggctggcggcatacatggaacgcgcgcgaatcagttttcccgtgccataagcgcttacgacaccgatcagcaagggataaatcatctgtccgctcatggaaaactccaccaccatcaccagggccgtcaggggggcctgggcagctacggcgaaaaaggacgccatccccaccatcgcatacgccaccgtatggttgccctccattcccagggacgtcagaaccgtactgaagataaaacccaccatgctccccacgtacagggtgggcgtcatggctccgcccaccgtaccgcagccgaacaccaccgccacggcagacaccttcaccagaagcaggacgagcgcctcccgcgtgccgtaatcctcatggaccagcccggtaatgagagcctgaccgttgcccaccacttccggataaaaaacggccagaatccccacgaccagcccggcggccgccaaacgcagcggcagaagggattggcggccattcaaatatctggcggccgcatccagcaaactgacccatcccctggccgccacggccgccgccgcccccagggcgatgcaccagagagactgggaaaagacagtaaagctttcaaacggggaactgtacaaaggggagggatcccccagcagatgcagcatcacgaacccggtacaggaggcaatgagcaggggggccagaatatccatgctcacggtaccgatgatgatttcactcacgaacaggcagccggaaaaaggggcatgaaacgccgtcgtgaacccggctgccgctccgcagccgaccagcagccggagccgcggaatggacacgtgcagacgctgccccacagcagacgcaatcagggcggaagactggatgataggcccttccttgccgatggccgcgccggaagcgatgctccatgccgcggaaaaaactttcagggcggaggcccggaacttgatcagcccgttcccgatggacatggcctccatgtattccgtagcctgccccggcatccttttcttcaggaacagcagaatgcagcaagccaccaggccgcccgccaccggaataaacatgcgccattccggctccaccagggaaaaggttcctacgcgggaatccgaccagatgccggtgagcatccactggatcacttccaccatccactcgaaaaacagagacatgcaggagcccaccatgccgacgagaacggcccatacataagtaacctgcctttcccccaccttccaatgatggaacagttttaaaatccatccgtaccagacggaatccggcggctgggactgggggagtggagaattcatagaaaagaaggcaatactattccattgtgacaaaaaaatacctccggctgttcgatacggaagaaaaaactgcccagccccctgcccctccggagccagagaagattttcaacggatacgcagacggctcttacgggcccccttcggggcctggcccccgcgccggtagtcagaacgtatatttcaaattgacgccgtaatagaaatcatcccccagccccttttgctttaccacggtcagcgcctggctgtaattggtgaacaattccacggtcaggcgcccggtagcacggaaggtaacgctcagattataatccagagcattggaaccatggtgtaccaccgggcctacataccccccattgtaaccgtagcgcactacggcatccacccgcacgcaatcagctatttcttcatgcatccccgcaaatacggcataataaccgcggaacgtatggttgttatactgccagtacaggtccgcgccgccaaaccagcggtcggaaaaatggtaggtcgttttcaatccgggacgcgggattcccttatttcccggaaaaacaaagctgtgctcataccagggcatgaccgtccagttgcccaattccctgacgtagtccagccggtatttcagctccgcatgattccggtggtccgtggaaacgccgtaccatattttccccacccactctttatactgtatttcaggaacaaacatgcagagagaaccgtcccacaagtccaagccctcgcactcgtacttgctagcccaccccgcctgaaatcgcaaataaacacgctcatccgcaggaccggccagggaaagggggtgggggcacgccgtcttcaggtggtaggactgttcctggcagaccgccgtcgcccaggctccgggacacgccagcatgccggtgcaggccgccagcgacaacagaattacggtattcatcttcatattggtcatggctggaaatttttctgaaacggcatatccggaagcggcgccatccacccatgcgtacccgcatcccgctttagccgcaaacggatactacgcccgcacccagacaaataccttctaaagatgagaccagcatgaaaaaacaatattcagttccaagagccaaaaaaacgaattccccatgaaagattgtgtcagcagtctttgtacctataaccgtgtccatgaaattcattatccccgcactcgccctggccgcctgccttcccgcagccttctcacaagaacaaatcatcccgaaaccggcggaaatcacattgttcacaggaagtccggcccgtctcacaccggattccctcatcatcacggaaacacaggacaaagctttcctggatcaggcaggacaattgcagcagatgctcagcgcagggacgggactcccccttccccttaaaccggccgggcaagcgtcgaaaaaagccgcttgcattgtcatcaaaaaagacccagccctggccgccaggggagaagaagcctactccatccaatcatccccaagtagaatcatcctttccgcagccgatgccaggggcatcttttacgcggggcaaagcctggtccagatgatgccctccgtcttccacgaccggacggcggataaatccgccgtccggtggaatatttctgaaactccgttccgcataacggactacccgcgattctcctggcgggcgctgatgattgatgaagcacgccacttctttggcgaaaaaaccattaaacagatcatcgaccaaatggctctgctgaaaatgaacatcctgcactggcacctgacggacgacacaggatggcgcattgaaatcaagaagtatccgcgcctgacctccatcggctccaaacgcagggaatcagaaatcggcacatggaacagcggcaagtcagacggaacgccgcatgaaggcttttatacccaggaacagatcagggatatcgtacaatacgcagcccgccgaaacatcaccatcgttccggaaattgaaatgccgggccatgccagcgccgccgccgtagcataccccttcctgagcctgaaaactcccggggaagtgcccacaacattcatcgtcaatacggccttcgatcccacctcggaaaaaacttatgccttcctgtccgatgttttggatgaagtcacggcgatcttccccggcagaatcatccacattggcggagatgaagtgcgctatgacaagcaatggaagggtgttccggaaattgaggaattcatgaaaaaaaacggtatgaaaagttatgcggacgtccagatgcatttcaccaaccgcatgtccggcattattgcccaaaaagggcgccgcatgatgggatggaatgaaatttacggacatgacgtcaatggggacggaggaggaaaagccggtgccaaactggatacaaacgccgtcatccaattctggaagggcaacaccagcctggctaaaaacgccatccgggacgggcatgacgttatcaattccctccacacctccacctatttggattacagctacggcagcattcccctgcaaaaggcatacggattcgaacccgttttccccgggttggaggaacagtaccattccagagtcaggggactgggcgcccaagtatggacggaatggatttccacaccggaacgcctgcactaccaggcattcccccgtgcctgcgcctttgcggaagtcggctggactcccgccggtaaaaaggattttccggatttcaaaaaacgcttgaaagcgtatagcgagcgtatggatctgatggggatcaagtttgcccggaacgtcatcagccaaatagacaaatctgactttttcaatacgcccaggatcggcacatggacgcctgccaccgtgacccgggaggaacattcgtttgacgttaccaaactggtcaaagcgtccggcaaacacaccgtcaccctgctgtacgacaaaggtgcccacgccatcgaaatcgaatccgtagccctgtatgaaaattcccgggaagtctcccgggacgcccatgcgggcaggagcggcgcccataaggaaaatatccagtacattctgaatgccccggaacccaggcaaggagcaacctatacggtcaaagcaaaattcaaaggggacggaggccgggattcccacgggacagtgtattttgaaacgccataaaaacacagcccccgtcccataccagaaacagcagggtcttcacatttactccgacaaacggagcacagcatccgcagactcatggttacggacacgagcctttcagtatcatcggcctcccaagggcgcaagcatgttttttcatagaggaagacgcccccttccatcaagcggcacgaaattgatactttaaaccagaaaggcttaccctgaaatcagccttgccttaacaaggctccggaggtcgttgcttacgaacctccggaacctgaacaaccgtgaatcggcggaagatgattttcatccgggaaagccagacggaatttacatgttatcatctaccactttttccacatactggaaaaagatgcttccgtcctccccgctgatcccatagtctctgacatcctcaatattcgcattcttgattcgggtaataatatagactttggagtacaaaatcccccattccccatactttttcttatcaaaccagatatggtggttatagtatggttcaaaatagatggtgcccccgtctatcggatcggaaatcgggccggaatatttgacaacaatatggctgattcccttgtaacaccattccctgccgcattgaggatttttggaaagggtggtgctcatttcaatggtggtgtccatgacatcataggacaacctatcctcatcatggtatttgattcctttttgaggcagattgaactgatttttgatgatgactccatcataaatgagacgtccccctttccattccgttttctgcggtactgtttcccctttcaagagacagattcctgagagagaaaccattattgcacaggcaattttattcattgttattttctactttgttgttgtttcagcaattccttattgaggaattctttcatttcctgaacagttttttcaggaggggtcttcgcatcgtcccgatattgcctccagtcgatgcgcagcttggccatcaggcgcaattcgctgagagaaaaaggaacagtacccggggcattcggcatgaaatcccgggacctgttgccaatataataaatctggctctgatcccaagaacgcttcatggtctcatcgaatgaagctctcacacggtcgtcgcttactctggcttcccactggaggcagtccgccaggcaaccaccctcggcccgactttcccgggcctgccgccacagggaaagaatatacctgttctgaagactgcacgcagccggagtcaggtacttgcgcgtatactgcaactcatacagaggcttgcacacagccttttccctctgtcccagagtagctccactcaccctttccggagtggggacaataccggccagagcaccggatacgtaataaggcagttcctcaggcattcgaatttcccacggtattttttcattcacaaacacgccgtttaaaatggtattaaaggaaccgttccggcaaatacggaacaggtaaatcccccctttcctgctcatgaaccttttataaactccggaccccgcaaatctggaaacgcgtgtgcgcgcctccaccgggtaggaataccactgctccatggatgcagcaagttccttccccaaattattctgttctcctatcgcaagatccccctcaatattgaactggaacacaaggggagcggtggaagggtgccttctggcttccaccacgtaatcccgcctggattcattggtgagataaccgttgggattgtaaaaatacagggctatttcatgaacaccttccggcacctctacggctacccatatatcgggtccgtccacaaagcccggatacacttctccgtggtcatcccactccgcctctgtccgcacggaatccgtagggtcgaaaagaacgttgcggttatcattttccttgatgctgtgcacccaccagcgcaaagcgtcccctttcttgcggttgagccccatcagcccctgaatccagtagggagacaaggcccctttgtatccgggatgtccgggaacggaagaaagggtacggaacttgataggcttggctttgaattcggaattgctcatgggggcattcgtggcgcacagcgtggcacgcgtgtgcccgtacttcccgcaccagtccccttttgtagtccagtcctccccccggaacacaatattcttccccgcatgcgcatcggaccccagcctttccaaccttctgagcaccacagaaggctcctccatctgcgccggacgagggaacgggacttcattgtccatctgttccctgtccagtttataagccagagtcccctttttcagacgaacaaagccccgtccgtatgtcgccgcccaaacactcccgtcctgaagcgccagcaaggaaggaacatccacgttttccaaacccttccttattctctgattcaccgtcattttttcagcatccagaacatccactccctgcatccggtagccgatgaaaatttcctttccctgctggataatggaagaaataaaatcttcagacaacattctggaattcgactcccccggcaccgcagtcttccgtgcggcagaaccatacagatggctgtttttctgggcataatcacgccctctcatataacgccaagaactaatgccgttactgtacgccaagcctgagcaggtacctaccaacacctggcccttatccgtacaagtcaaaacattgcagatattggaaggcaaaccatcaccatacggctggtacggctgacgggcgaattgcctgttatcccagtaccagggagcctgaacatttttccactgcatatactttgactggcgcgaagagcaggataccccgccgcaagcataggccagccacaaattccccctggtatcaaaacctgcggaagccgcctggtcttccaccaggccggtggacctgtccagcgtcttccatgaatcgcctgcaggatcgtaaatggatacgcctccggatgtggcgacggccacctccccggaaacgggagaaatggccaaagcataaacatgctctccattcagggcattgctgcggtcatacatcttccattcccttccgttaaaaacggctacgccgctgtcatccgtgcccgcccagatgcgaccctgcctgtcctccgcgatacaggtgaaattctttcctttggggaaaccggaataataatccatattaagccacgatttttcatatgtccggtccccaatctgaaggcggtaaatgctttctttttctcctacggcccaaatagagccgtcgccagctaccagcgtgccgcgaataaaacggaccggacattccggaagttgctccggtatctggacggttacgacctttcctgccgcccacgcccccaacaaaaggaaaatcaacacaaatgtccctacgaagtatttgaatttaatcaacataaccaactatctcctgattattgcaggataatattatcggtttttatcactgtcaacgtcattttcaatttattgtcaagtttatccaaataaaatacggcataatccgtttagaattatacacataaaccatttaatatatgttagttatattaaaaacatcaattccaagaaaatcctcactaatacttttttatgcttggatgggaaaatacaggggacaggcctgacagcaacgtccggcattccgttttttcaacatgtttcccccggttattctctgattcaaatttcaaacctaccatgcgtttccccatataaagttatatttaccggccttttttgaggcaggagaataaacacagctcaagatccgaaggagaagccatctactcttccgaagcggcaataggaggcaatatggacgttcccgaaggagggcttcccgatgatggccaaagaaaaagaaagtgttgtcctcaccaacacgaacaattctcccggacctgattccagcaaccagttccggcatagtcacgcagcacccttccgacaatgaatgaggtattgcttcataaagcgggactgacggtcaactgtatattaaagccaccaaaggaaaggagggaggaaccagtccggcaggcggaaaagaagaaagcaaagacaaaaaagatggaagtaagcccccggttttctccctagatggcctatccgggcgatgataatagcggtctgcaggtttctgttgagccccaagccgggggtatgaaacgccgcctccctaaaagatgcggccaaattcacgacagatagaattatgccgttccgtacgttccttcctcatacccaggtgccaattattacttctagataaaagggaaaaacaaacctccctgacctatccaacccctccggattatttctggagagggaggtgttccgttccacaacaaagaaaaggaacatatcattctgcatccggcccatagcagaacagcctttccgccccggattacctccctggggctgttgaataccctgctgaaatatcgaaacgtatcaaataaacacttattaaagctccgcagccgtcaggtccacgcacaaaccttgacaactgcggagctgcgcttacacacacttattcatccaacaaaaatcgctcagcagagcttcttccatcaggaatggtggaaagccgttccttcttccgccgtcatcggagaagagaccgggtgtttctcgaagaaagagagcatgcgcttgtagtcttccaggaacaggtctgccaaatctttggagaagccctggcgaaccatgacgcgcatcaccaccgtatcctgacagttggcagggagcgtgaaggcgggcacctgccagccacgggttctcagcttgtccgaaaggtcaaagagcgtgtagttcgtacgggctccatccttgatgaagaagcagacggcgggaatacctttttccggatcgcccgtacaaatgaattcgtacggtcccagtttggaaagctcatctgaaatgtacttcgctacctcgtaggcctgcgtatggatgttcgtatagccttccttgcccagtcggatgaaatcataatactggcagataatctgtccggccggtcgtgagaagttaatggcaaaattgggaatttccccgccaagatagttgacattgaagatcaacccttcaggcagttcggaaatatctctccaaacgacccagcccactccgagcggagccaatccgtatttatggccggaagcactgatggacttgacgcggggaatgcggaagtcaaagacaagatccggggcgcagaacggagcaaggaaaccgccgctggctccatctacatggatgtcaacgctgatgccggtcttgttttcataatcatccagggccttggcaatttccgcaagcaattcataagcacccgtataggtcactccgaacgtgggaaccacaacgatggtgttctcatcaatctgttccagcatccggtcaacatccatcttccattttccgggcgccatcgggatttcacgcatttcaatatcccaatagcggcagaacttgtgccagcagatttggacagggccgcataccaggttgggcttgtcaatgggtttgccagcggctttccggcgggctctccagcgccacagggcggccatgcctccaagcatgcatgcttcactggaaccgatagtggaacaaccaataggcttttcattctggctggcattccaaagattggcaataatggcagcgcagcgcatctcaatagcggctgtctggggatattcatccttgtcaatcatgttcttgttaatgctgagattcatcagcatcctgacctgcttttcatcccaggtctggcagaaggttgcaaggttctggcgggcattgccgtccagcatcaattcatcggacaccaattggaaagcgtcctccgcgcgcatcgcataatccgggaactcatccttggggagaaggttatctgcttccggagaaccgaaaatggaattttccgaccgggctgtatcgggtttttgatttggatcaaacatgacggtatctattgtttcatcgtttccgggccaaccgtgaaaggcaacccgcatgaaggatagaagcacccgcgaataaaagcgttcatatttccattgtcattatcctaggtataaatttcccggaaaaacacagaggcgagatttatttcatcattcattgatgactaaaaattatttaattgcaaatatctttataaaaactcgtcaatatctccagataactttatgtatgacatctccatattatgacagttaagagaaacggacgttttcggatacaattcccagacaggataatgtgttacccccctatcttaacaatacaacatccattggaaaaaactgtgtcacggacttttacagttcctgatgccgaggcgtgcatgcgcactttcagaaagggaaaaatacggattaacacgaatttccatcaaaaaaactgctgcacaacaataaaaccaacatcgtggaatcttccccgcttttcctgatgagcaacttctggtgcagacagggggaagaaatactcaacctataccgggttaatgccgtagcaagttacacccttttaagtcacagctggcagcagaggtaccttctccccctccctgcactttttacccggtcaacaggcggcattccttcaagattacgcccgttcaattttccggaaggtatccttcacataaagtacatgcggataaagaatggaatccggagctactttgggatgattgaattccgctatttttcgcattccaacacgttgcatcacagcttgtgaagggaaattcacgcaagcagtaaaagaatataccctgtcaaagccgaatcgtgcaaaaccatgtttcaggcatgcacgggcgccttccgtagcgtatccgtacccccaggcttccggcacaagcctccagcctatttccacacacggtgtaaagtccgcttcaaaatcagcccaatgaaagccgagaaggccgatcaaggaaccggaatgtttcaattccactgcgtacaatccataccctctttcatccagttcttcccgtatacggttccacatggaaagagaatccttttccgtcatgacaccgggaaaaaaacgcatcacctggggattggcgttcatagccgcaaaaaaaggccagtctttttcccgccactcccgtaacaccaggcgttcagattccggcaatgacagttttcctcccggcatggccttagttgtacatggaaagctctatttccagctccgggcagcgattcacgcgaaaccgttcatccagttccagaatttggctatggcccaggctgtccttgatggtgagattgactttggaacgaccgggatacctttttagaatatcccgtatctgttccagattttttctcgtgtggcggaggggactgacaatgatattcagaggcccctgatccccggatttggatttgcgctttttgcctccaagtgggtcaatgctctgggcagccacgcttttggaggatgtacggtcatcctcccggatgttggctcgcacggagacgaaaacgcccggctccaagcctccctccatttcctgagccttttcataaacatccgaccacaacaacacttctatgctgccggtaaaatcttccaacgtcagaatggcgaattttctaccggccttgctgatttttggggtgacggaacgaaccatgccggcaatctggtgcttctgcttgagttcgtgtggttccagcgtgtcaatgagtcctatgcgggtatatttttccgcatcaatgacaccgcgcatggagtccaggggatggccgcaaaaataagcgcccaacagatccttttcatctcccatacgctgctccttggaccactccggaacggcaggttcatccttcaccctgggcgcttcaaaggtcatgtcaaacagagacccctgccccagagccttatccttatgtacctgggaagctccgctgagggccaggtccacacgttcgaacagaacacaacgcggctccagcgtccagtccagcgctcccgcacgaatcagggattccagaatctttttgttgacagatttggaatccagcctgttacaaatgtcctccatactggaaaattccccattcttctctctttcttccagaagaatctgcatagccccctctcccacgttcttaatggccgccagcccataacgcacggccagcttgccggagggcattttctcaggagtgaacttgagcatggatttattcacatcgggaggcaggatctcaatacccatgcgattggcttcctgaatgaacactccgattttgtcattgttcgcctcattagacatcagcccgcagaggaattccacagggaagtgggccttgagataggccgtccagtaggaaatatgcccgtagcaggcggagtgggatttattaaaaccatacccggcgaatttttcaatcttgtcaaagatagctgtagccgttttttcatcaatctggtttgttttccagcatccttccacaaagtgggccttttccttggccatcttcgccgggtctttcttgcccatggcgcgccgcagaaggtcggccccgccaagcgtatagccgaccagcagcttggccgccgcctgcacctgttcctggtagatcatcacgccgtaggtttccccactgacctgttccagcaaaggatgctcatactccacctggcgcagtcccttcttcacttcaatcatttcatccataaactgcatggctcccggtcggtaaagagccagcaagtcaatgatgtcttcaattttctgaatcccgtaacggcggcaagtgtccaccataccgccggattccaattggaaaacccccatcgtatcccccctgttcagcaagtccagggtttcccggtcatccagagggacggaatccagtttgaactccggcacgcgccagcgggcgtattgctccgcatcatgcatgacggtcagtgttttcaaacccaggaagtccatcttcaaaagccccacttcataaatcgcgctcatgtcgcactgggcgacgacagcggcatggggatcggacagatcgtcacgggtgagggccacatgctcgtccaggggacggtcaccgatcacaacacctgccgcatgtacccccacgttgcggatcaagccttccaggcgggtcgcgtacccccacaattccgcatacccctcatcagaggcaatcaactccctcagctcctcgttactcttgtagctggactgaagagtcaccttggggccggtttcgataagtttggaaatacggtccccgtccgcataggacatatccatcacacgggctacgtccctgagtacggacttggcacccatggtgccatacgtaataatgtgggaaacagcacgctctccgtatttctgccgaacataatcaattacttccggccggcgtgtctggcaaaagtcaatatcaatatccggagggctgacgcgttccggatttaggaaacgttcaaagattaatccgaatctcagaggatctatgttcgtgattttcatggcataagccaccaaggaaccggctgcggaaccgcgaccgggacctacgggaatgtcatgatccttggcccagttgatgaaatccgccgtaatcaggaaataggagggaaatttcaactggttgataattccaagttcataatccagacgatcgcgcaattccttatctgcagctacacgatcctttccgtaccgttcttccagccccttatagcatactttacgcaggtattcttcgcgcgacgacccgtccggcgtgccgaattcggggtatttctccgtactggtggaatccagtttgatggcaacattgcaccgttccgcaattttcaacgtattttccacggcctccggataatccttaaacacctcccgcatttcctctggagatttcaaatacacttccgtggaatagcgcatgcgttttggggaagccagtttttcgttggttccgatgcaaatcagaacatcgtgcatgtcgtgatcttccttcctgaggaagtgcacgtcattggtggcaacaatgggggtattggtcttgcgggcgatacgcaccagctccggcaggcattttttctgttcctccatgccatggtcctgaagctctacaaaaatattgtcgtccccaaaaatatcctttagcgccagaagggcttcctctgctttttcaggctggtcattgagcagccactcattaagcggtccggcaatgcatgctgtacaacagatgaggccctcatggaattcccgcagggtttccatatccacgcggggtttataataaaagccttccaagtgggagcgggacaccagcttaaccagattctgccacccggtttcattttccgccagcaaaaggagatgtgtgtatttgcggcggccgggaagctgttttttcacgctgatgggcgtcggggaaaggtaaacctcgcaaccaaagataggctttacctcctgcttccgcggtccttccggatgctccttgttccaggcggccacggatttattgaggctgtttgtctccatgaccagttcaatggctccgaacaaattgccgtgatccgtaacagcaacggcgggcatccccatgcgggaacactcagcaatgaggtccttgatatggacggcgccgtccagcaacgaatattccgtgtgattgtgaaggtgtacgaaggaaccgggcatggatggatcctgtaagcggttaataaaggaaatcagcggtgaacagggcattcggccttcatggcttccacgcattcccggataaggtccgggccgcgataaacgaagccggtataaagctgcaccaggctggctccagccttgattttggcgacggcatccgccccgttcataatgcctccaacgccaatgatcggaatacgtcctttcaattcggaagcaaaagctccaataacttccgtggaccgttccgtcagaggagcgccggacaggccgcctgcttcttcatgccgaggattggcctctaccccgacgcgggaaagagtcgtattcgtagcaataagaccatccagtccctcatccagaaaaacgcggctgagctccgcaatatgctcatctgtcacatcaggagccactttcataaaaatgggcacatggcgacccgtttccgcagccaggttggattgctccgatttcagggaagccagcagacgggcagcgggttccgccgcctgaaggtcgcgcaggcctggcgtattgggagaagagaaattgatggctatataatccgccacaggccaggccgcacgcagacaagtaaggtaatcctgggcggcatcctcattgggagttattttatttttcccaatattgacacccagaacaccgtgaaaacgagtggcggaacgaatgttttccactccggcggcaataccttcattgttaaatcccatccggttgataatagctttctggggaatcagccggaacaggcggggcttttcattgcccggttgcggccggggcgtcagcgtacccacttccacaaaaccgaatccggcctggccaaaagcgcttaccgtatccgcttccttgtccattccggcggcaagtcccacccggttggggaatttcatccccaggatttccacaggatcagaaggaacttcccccattactagaggcagtacacgcatcttttctgccagacgcaacccccacaaggtcaccttgtgggcagtttccggattcatttggaataatacacttttagcggcggaatataaggcgggtgacacaatgcggggagtgtatcacaccctcttttagggtcaagaatgggaagcgtcttgccgggatgattttatccggtacaatcccttgccatgaacaggaaggaatgcctctcatcctgccgtctgtacggtattgtagatatgggatatacagctgaacatcaactactccctgtaacagaaaaactattggcaggcggcctgcgcattctccagctaagggcaaaaaaccataacccggaacacattgaaaatatggggcgccagcttgcccccctgtgccgtaaatacggctgtcttttcatcatcaacgattatcctgaaattgccctgaacatcggcgcagacggcgtccatctgggacaggatgacggagacttggcatccgtaagggggctgctgggaaaggatgccgttataggacggtccacgcatagtcctgaacaggccctgggtgcatgtggagagcaggcggactatatcgggtttggtcccttgttccccacgggtaccaaaccgggaagacaagccattggcctggaagacatcgtaagcgtacagcaacagctaccggaaaatttccctgtcttctgtatcggcggcatcaatgggaatacactgccctccgtactggaggcgggggcaaatagggtagtcatcgtttcctggctgcttacacaccccgacatcacgggaacagtcagaactctcagaaaagaactgggagaagcgtaacgaaaaacgcgcacctccatccatgttatccctgcctttcctcttcctccggagacagagccggacgggagatcagaaaaacggcggtattcacaatcatctgcaaaatgtgctcctgatccttcatccacggttccttttcttgaagatccatgcacgcgacatatttccccaacgtagcatggaagatggagctcatgatatgcgcatgccaagataaggaaagctcatcatcccacggacagaatctccggattcttgctatcatctcctggatagatggagcataaaattcatcatagatttttcttcccagatattccggctcctgcggcaaacgccacaataaacggacatgatccggccctcccaggctctcatccagaaatagccggaaagcaggttctataaatgcacgggcatacgccctcagggacggatgaagatccgcctctttcagcatcttcatgcgcgctttcatcagaggttccgcatattgtctgtaaacagccagatacagtccctccttattctcaaaatagtaaacgatagaagccagattaactcctgcttcagaagcgaccgccctcatggtcacgccattaaatcccctgagggcaaaaagcttctgtgcagcacggaggattttgccgctggtttccgcagaacggtcggactgggatttgcgggtagaagacatctcctcaacaatcagacaatgcgccgcctagcgggaagaacggcttgagccgatggcttttaccaactgttccatgttttgggaggactgaataggcttgccgtccttgtccaccagaatcatggtagggataccgcgtggagccaccttcttggcaagctccgtcaaatcctctttcaacaggataggccatggcatgttattggcagcagcccatttttgggcggcatccaggttctggtccagattgcacatgattacttccacatccggattatcctttaccaccctgttataggcctccacgctgtgaggcgcattccggcagcaaggaccgcaccagcttgcactgaaatacaaaatgaaatgcttgggattcaatttcccgtccctctttttaagtttgccgttttcaagcatgtaagtctttcccttcatctcttccgccacagggccggacggcatggacgaccattctgcaataggcttgccgataacttccttgtgttcctccagccatgcgcgatcttcatcggaaagcttttccagcggcatcgtaatgggctttttagccgtcgtcaccaatttgacggtcttcatattcagggctactggacgggcttccaccgtactgcctgtatttttattagtccaggtgcgaagggaaggatcatccgctgctccggaagaatccgcccaacagagagaggaccccatcatgaatgtggatgccaataagatacaccaagatgaaaatttcatacacataatgctaatatactatttcttatcttccatgtcgagaagctgattccaaaatttgcctggcccgggcatgtcccgggtcgcggcgcagggcttccgcggcagcggcagcggcctcacggtaccgcccattgcggtaaagcatcaccgcaagagtgaaaggaatatccgcatttcccttttccagggaagaacagttttccaaatcctgcaaagcctgctccagccggcccactttttcattcaacagagcacggttaaacaaagcacgaataaaggaaggctctatttttaaagcttcgttaaaggattccaaagctcccggctcatcattattttcaatctggcccagtcccaggagataccacagattggcatccctgggagccaagcgtacagcctcttgcatctgatccaccgcctcccggctgcggccttgagaagccaggaaaacggcataatcacggtgcaccacggatgaagtggcatcccatttcaaagctttggaaaaccacaattccgcagttttcacatccttacggctaatggctatctgggccagcttcatagctccggaaggctggtccgcctggtgcaaagcggcagcagtaagctccttcattcccggactgtccggaggcagggaatcccggagagcccattccgcctgcaagcgcacgactctgaacggatcattaagaagtttgcccgcagcaggattacccactcgccccatcactttggcggcggcggctcgcgtcagaggatccgggtccttaaccgccgccgcggccacttcctggacggcgggttcatgaacccatgcatccatcaaatccaataacgtagcgcgccatgcacccacttcctccctcttaaaacattccataagcagaggcaaaacatcttcctttccttcgtaggcatgctgaacggccctggtccgttccctgtactgcgccattttgggtttagctccgtaatatttctttaccgcctccgcagcccattcattgcttttttcctcgtggcacatggtacaggcattcggaatacccaactctacgctcagcaaaggatcaggagaattgaaagaatgatctctgcgggggtcccgagccatatacaggctttccggcatatggcattccacacaccgggcacccatgctggactgaggacatggcgtatgcgtagccatgtcaataacgggagcttttacgccgtttaccgcttctccagtaccgtgacacctcaagcagagcgtattatcttcctgaggaagcttcagtgttcccgtatgcggatcatgacagtccaaacaggtcactcccgccttgcccatacggcttaacctcagaccagtctcgcaataatcctcatccctttgcatgccattgggccagaaaacgccgggctgcacgggaagcaccagttggaaatgattgtcaaagcggtcacctacggcaaaatcatgatcaaattcatccctccgggcatggcaggaagcgcagttatcatgaatctgctgtggcgttagcttgttcctggtggaaatcatgcaacccgtccccgcctccggcttgtccagcagggggccgtggcattgaatgcaagtcactccgggttccgtccaggtagaagcataccgatctttaacaggatcataattcttatggaacaaagacatgtggcaccacgcgcactgcgtgttccaattcatgcctcgtcctgtccagtgcccccagtctcccggctggcgggactccttgccgaaaatatcaaaccattctttgcggttcacgtcccatgcagcgctcaaggtatgaaaaccgccgtccttggcaggaaccagatactgcaccaggggaattctccctgtggcccattccgcgcgccaggaggttgaagactgaccgtcatggaccatgcgcccgtgaccattcgtagagaattggagaatgctgccatgagcgtccagcttcatgttatggaacgcttcagattcccattgatctcccagtttgcggaatgcccaggcatggtctgaaccggcccactgacggaattccttttcatgacatgctccgcactgcatggaaataggcacctcattctggtcccagtgctcactgcctcctgaaaaaacaaccggctgcgctgccgctccagaacgtctgtccatccaggccttcaccattgtgcccagtccgatcaaagccccaagaacaacgaggagaaccacccatttcttcatggaagggcggttcacaggggcatcagcagattcaggggcggacatggcggaaatattctgccatatcatacgcgctccaccaaggaacttttacatcaggcagcacagtccttgacatgcccagtccgtaaacggcagattattcctcctcttccaggacctcttcccgcatcagggtagtaatccgggtcacggtacagcgctccacaccgccattctccgtccgggtcaccttgaattccagccctctatagccgacagtatctcctttctccgcaggagcttccagcaaattaagaatcaggccccctacggtgtctatttccccgtcctccaaatccatgtccatggcctcccccaattcctcaatgcgtgccagaccggatacgtcacaggagaagcccaccgcatccctaggcaactccgtcagcactttaatgcggcctcggtcccagcccattacttcggaaaaaacatccgtcagggtcaaaagtccggaagtccccccgtgctcatccagaataatggcaaggcgcacattgtccttcctcatgatttccaccacattgtcaaacttcaccgttttgggaaccttgggtatggcatgaatgtattcaggagtcagagcctttctgcggaacatgatacggaacagatcgcgggcatgcaccatgcccaccacatggtccagatcaccgcggtagacagggtaacgcgtacggcgagtgcgacgcacaatttcccgtatctgctcatgttccgccccttctggaatggcgtctatcctgacgcgcggggtcatgacctggtgtacatacagatcatccaggtcaaacaagccgtccatgatgcggccggattcctgcggcaacgccccgttctcatggctctcttcaataatatactggagttcttccgcagaatggtagtgggacttggattcattacggtccacacccagcaaccccagaaagaaattgcccagggcattcatacccactaccagcggatacagacatagctggatcacgtacatgggcatcgcaatgatgaggcaaagctttgcggcgtactgtagggaaagcgccttgggcaccatttccccaagaacaatatgcaggtacgtcagcaccgccacggacaggatgctggctgcgccatgagccaccagccaggaagcccagccgtactgcgccaaccattcatggagccatccggctaccgcatgctctccgtacatacccaaccccagactggcgaacgtgacgccaagctgcgccgtagcaatgtagcggtcctgtaaccggggcgttttcaatatctgggaaacgcggcgcgccaccatgttgccggacacacccatctgctccaatgccgcacgcggagcgccgagcaacgcaaattctgcagccacaaacaggccgttcagcacaatcagcaacagaataatgaaaaccgtcatcatgcatccaccccgctttccatggcaaattcattttcctttctctccggaggcagcagcaggatagaggaaacacggttatggtccatcttttccaccacaagcacgcgtccggcgataatcaggcggtccccatccttcggaatgcaggacatgtgcttgatcacgcagccgcccacagtagtggcgccattcatcaaaaagggtaccaggcattccgccttatgggcacgcatcatgccggggatgcgcacggaaccatccggaagggtttccaccttttccccggagcggatgaattcctcatctatatctcccaccatttctcccagcagacgttccagcgtcaccagccccacaaacttaccgtattcatccagaacaaaggcttccttggccctgtcttcccgcaaacgggccatcagcatctctaccgtctgcatttccatcacgcatggcacctgcctcagcatggaacggagaggaggcagaattcccttttccgcataagcggataccatatctttaatatgcagcatgccaatgacagattcacggttcccttcatacacgggaatatgggtatgaggcctatctgcgatcatattcaaaatatcttcctgtgtggcatccacatccaggcaaacaagctgaaaacggggaatcataatttgttccaccgttcgttccgccagggacaaagcgctgtgcagccgttcatgctcatcttcctccaacatcccgccctggtggctttcatccagcagcatattaatctcctgctgggagtggatgtgctgatgaccgccaggtgggagccggaacagtttaagaagcaacaaaccgcttccattaagaaagtcaatgaaccatgcgaagaaagccagtgtccatcgcatgggataataagtatacaaggccgcctgcttgggaaactgaagagccagggatttgggcatcaattctccaagaattacctgaaaaaccgtcaagcctatcagtacaacaagagcggctgcagaattggccattacggagtccatcccaccaaaccgctcaaacagagggaacagataggcggccagttcaacctgtccgtatgcgcccagaaccagactggaaatggtaatgccgaactggcaagccgcaatgtagcggtccagctcttttgtattttccaaaatcttaagcagatgaacagccaccctgctgccgttctccgccatttcccggatcatgttgcggcgtacgctcactgcggcgaattctgctgcaacataaaaggcgttgaccagaatcagaaaaagaataacgaaagtgacaaaaagaatcatgtatggcaggggtgtccgtaaaacgcaacgggcatccgcatcataggaaccgaaaaaatcctgtcaagaacgggaaacaaaaaaatctgccatgcggaaagagctccattcctcccgtccctttccagcattccaaactttctccttccggcacaggtaaaaaaattccggcgatcacgcaagcagttgaagcaactgcaaaacatctttccagcaaccggaaagccccgttcccggaataaccggaaacggggctgagagtttaaaggctcaacgaaaaacgttattccgtaatgccggcggcttctgcttcggcagccttggcatctcgcaaagcggcacgtatggacattttcacgcgtcccttgtcgtcaataccaatgcacttggcggtcaccacgtctccgacgctcacgacgtcctccgtcttggcggtgcggccttcggccagttcggagatatgaatcaggccatccttgccgggcagcacttccataaacgctccaaaggtggtcgtggaaacaatcttaccggtgtacagttccccgatttcaatggtcttgaacatgcgggtgaccaattccaaagcacggtccaggccttcctgcttggcggcgtaaatatgcacggtgccatcttcctcgatattgatatcggcgccggattcggcctgaatagccttaatgttcttgccgccggggccgatcagttcgccaatgcggtcggcgggaattttggtggtctcaatacggggagcattcgggctcatctgggccggagcggcaatggcttcattcatgaccttcagaacatccgtgcggcaggctttcgccacgtgaatggcttcctccaatatggagaggggaatgccgggcagcttgaggtccagctggtagcctgtcacgccttccgacgtgccgcagagcttgaagtccatatcaccgtaaaagtcttcggaaccgatgatatccagcagagttttgtaagaggtgatttcatgctggtcattctgttccgtcaccaggcccacggaaatacccgctacagggcgcttgaggggcacgctggccgccagcagagacatcgtgcccgcacagacggaagccatggaggtggaaccgttggattccatgatttcagaagagacgcgaatggcgtacgggaattcctgttcgccaggcacgaccggagcgatggaacgttccgccaaagcgccgtggccgatttcccggcggttctgaccgccgaaacggccggtgtctcccacggagaaaggcgggaaattgtagtgcaggatgaaacgcttttcattcacgctgcccgtgtaattgtccatgtactggcgttcttccatcggagcgagcgtcgccaggcaaagggacatcgtttcaccgcgggcgaacatcgcggaaccgtgcaccacaggaggcagcacattgacttccgcagtcagagggcgcagctgcttgagagcccggccatcggcccgcttgtccttttccatgatggagatgcggaaagcctttttctgaatatattcaaaaacctgttccacatcaaagtcagtagcttccggatggcgttccttgatggcggcctccacttcgtcacgcagggcccctacttttttctgacgctccaccttggaaggggcgtaaatggcttcctcaatacgatcgccggcaatttcatagccgatttccagcaattccggcttggcaaggcaaagttcataagcgcgcttctccttaccgcaaacggcgcggagctcttcctgcttttcgcaaatgaccttcacgttctcctgggcgacacgcaaagcggcgataaaatcttcttccggcagttcattagcggaaccttcaatcatgatgacctgatccttcgtgcaggcaaataccagatccagctgactatgttcacgctgggagttggtcggattgataacaaactgtccgtcaatacggcccacacgcacagcccctacgggctcggcaaagggaagatcggaaacgacacaggcggcggaagcgccgttaatgctcaggatgtccggttcgttttcaccatcggcggagagcagaagcgtaattacctgcgtatcgtagaagtagcccttggggaacatcgggcgcagggggcggtccgtcatgcggcatgtcaggatttccttttccgtgggacgcccttcgcgtttgaaatagccgccggggaacatacccgccgcagcggccttttccttgtactccacggacagggggaagaaggtttgcccttccttgactttggtggcgcttaccacggtcacaagaacgacggtatcgccgctgcggacaacaacagcaccgtccgccaaacgggccatcttgccggtttcaatcgtgataggattcgtaccaacgttgcattcaactgaatgtatgctcattatattttttgtctttcaatcacccgcagcctcatcagcccatccaggccggctccgggcgggaagcctgaatggcgtcaggtacgggcagtgcctcaggaagatgttatccgcgacagtcctttcccagaaacagaggggggaatactgtccacgcggcaggacgcgcatcccagatggatcaaacgctccggcccagtcttaccggcttgacagcctgtgaaaatccgaaaatttctcaaggcatgcccgacagaaacgtttcgggaaacgaatccccgaacgtcgaatgagagcataatccctgtcaaggataatgcaagcaaatagtttgataaccatagcagtccatttccttccagggctttaaatattcacccgcatggggagaaaaggtatttttcccatctcaccttcatccattcaatattcttcgcattcctgattgaaatgcattactccaagcaaaatatccggaaatgtccgccttcccttcttcacaggagcggaaatgcagaatttaagggcgggctgagtattcctgcctgactcccataacagccgcccactgctttttcatccatattttcctattctttgcgcggctgcatcatacccgcaataccggactttccgtccccagcaaacatttacgcaggaataaaggggcagtcatgccaacaaaaacaatctccacactccagaatatcttctttcacaaaaagacaggcctttcaaactctcctgaccaaaacacaaatccacagtcacccgccatgccccccttccatgacaacgctaccacgccagcccctcccataaaaacaacggccgctgcggaaaaccgcaacggccgaatcaaacgggaatatgctccgccttttagcggcgaaggccaagacgctggatcagactctggtactgggccagatcttcacgcttgacgtaatcaagaagcttgcggcgcagagccaccatcttcaacaacccgcggcgggaagaaacatcatgtttattcgtgctcaggtgttcggtcagatgggcgatgcgctgggtcaggcgggcaatctggtagctggaactaccggaatccttttcatgcatcttgaattcctgcaaattgatttcgttactcataagtgttttccttgaatgtatttagctcgtggcagcggctaatcgacactgtgagggcgccaactatgcatcatccagccccaaaagcaattcaaatttcgtcatcccggggaatttgccttcggtccctgggaaagcggcccctctccattttccccggtgtcccagacttcgcggtccttttccgtcacggagcgaaccacacggcagggattacccacggccactacattggcggggatgtccttcgtcaccacgctgcccgcgcctatcacggaatttctcccaatacgcacgcccggggcaatcaccgcatgaccgcctatccatactccatcctcaatggtaatgggcagagcaaattccagcccctgccgtctcagccccgggtctacgggatgcccggcagtataaatgcccacgttgggacctatcagcacgtcattgccgatggtaacggcagcgcagtccagcaccacgaggttgaaattggcatacacgcggtcccccagccgtatattggagccgtaatcacaacgcagcggaggttccagataacacccctctcccatttggccaaaaagctcccgggccaattcccggcgcaggctttcattttccggagcggactggttataacggaaaacaagaaggcgcgccctgagccgggcggcagccaattcagaatcctgggcatgatataaacgcccggacagcatgttattccagtccttcgaggccattggatgaagagggggtcacagcgtccgcctcagaaaaaggcagctgcccgtttttctgttctccaacagacggcatggcggcggcatctttttttacggacgtttccgattttacaagttccttctttccagaggaagctgaatttgcgccagccaccggggcagcaggcttgtgcaccgtccggaacattccggacggcttttgttgaagctcgtgaatattccagtttccatccctgacaaccacacgggttcctacgggagctatctcaaagagatttttcgcaatcaagtggggaacacggatacatccatgggaggatggatgaccgggcaagtacccttcatgaattcctacagccccgttcactctcatgaaatagggcatcttggcaggttcaaacctctcgccgggacggggggaatcccttcgtatatccccatcccgcaattctccgtcagcgttaataaacgcaccgtaataggaatgatggtcttcctccttggaagcaatgaggaagtagccggagggcgtcatgccggaacttcttccggaactgatgggggcatacgcaatgcggtgcgacccccggtagatatacatcatctgctttttcttatccactacgaccagcagctttccgggcagcgacggatcatcttcccacttgagcaggtgccccggaatagttcccgtttcttcaaaataccccgtcatttcttctaccggaatatgggaagaggggacaggggaaagctcccttcccgtggtaccgcaggacgaaaacaaaaacggaacacacaggcaggaaaccaacggatggaaaagggataatttcatctcaataagtcgcatcactgcgttagacagctggaggccggaaaaaagaaccgctttttgacaaaactgtcaactatcaatcaaaaaaatctcttttcctttactcctgccctccgttaccacatccgggcacgcctgccgcgctcccggccgttcccggttccgtggagcaggccatgggaccaagcctccgcaaaggttcgtgcggcatccgccgtatgggaatgcccgtcatgcacggggctttccgcaatggctccgcctacgccgggaggcctggacctgtacaactccagatgctccacgcctcccggctcctcttccccacagaagcctcgcgccttttcctgggtgcgggcatggaaaaaactgcgctccagcaattccctcagcgtattaatgccacaccagacatccgtggttctggggacgacgcgcacattcaccaatcccagcctccccatattctccacataagaaatgccgtgcgcatccctccgtgcagcatcatgaggcaaaagatggaatgttaccgccacaccatgatttttctcccagtccttcattttttcaacgtaatgggccaggggctgctggctggcggcataatggtccagccagtggaaactgtctcccatgatctgcacaagccaaatggccgtatggtcactcagccccagatcccatgccgtgaaagtgggagcgtccggatcagcctcaaactccacccctacctgcccccgctcccgcagggccatgatacggctgccgtaaatactgccttcttcccctgtagcaaaagcctcctgcggcgttcccggatactcctgcttcatggaggcgcccatcacccgggccatccgggcataccatctcttctgccccgcatccagaaccactccggtctcccgttccagagaaaggaaatactcatccagttccctgctccatctgccgcgccccggcaaagtgtactcatcctggtcaaaccagctgaaaaaaaagaatctgaaatccaagggggaaagctcgcttttgcccatgttttccatggcctggcgcgtcagttcataattcactccgtaccgtccgccctcatgagtgctttccttcagaataaaacctccggggggaactgtattgattgcccccgtacggatttccctggctctccacggagcatgcacggaaacatacgccagctcggaaacatggagaaactgcatggttccccctcgcagattagtccccacccgcacatcgctcccattggagaaagccaggcggctgcgcgccaacgtacggggttgccattccccctttttttccacgccggacaggctcttgatcctctctcccagccgggccagggccacatccatcgcagaggggttgggcggcacgtaatccagatggtcccaggcaaaatgcagcttggccagtttctgctgggcgtccggcaggcttttatcaatgattccgcaatggaaattggaccggaacaggctcatatccagcatcaacatggccacatacgtagaaatgcccaactggcgcgccttcaggatgtcattcctgtaccacagccgctcatgcagccgccgctgcgccctgttcagggaaaaacgctggagctgaccggctttattttctatccagtacaggtgttccagcctccaaagctggctggacaggacggactgccacggcaggctccatgattccgtcaaatgattagaattttccatactcctctattaattctttcaacagggctccttccctggtcatccccttctgggcctccgtccccttgtccaggggaaggcggtatgccagtggatcgttcagcacgtgggaaacgaaccggagtgcctgcaccatcacgggatcaagcagatcaagttttcctttcaaataactctcacgcacgcccagttcttcatacatcctgattacatcctccatgaagcatcccacagcctgtcttctgttccaccaccatcgttcctgagcatccgcatcccccagcgtttccaaaatccgacccaggaaccgggtacggctcgcccgtgaatcttccggggaaggttcctctccggctcccgtaaaacactccagcggaatataggaatcccgttcggacaccgcaggcgctccccggctgtccagataaacgccgttccatgcatgtaccacgtagggcgcgcgtgcctgccgtacgggactttccggaatgcccggcatcaggcgcacggtatgccccgggtcgtccgggtcacggtaaatcacgcagttggcatacatcgcgcgcgcttcctctggctcaggaagaaagggaagcatgccgcctcttagttcctcctgcctgcggtccagaacaccaatcagggaaatggcctcatccaacgggagttcccggttccaggcagacgtcacccccccgggagccgctccggaatcaatccggtaaatcttccctttccaactaaccccggattccgtagcttccggtcggcctgcaaaatcccgcctcaccgcatccagcgtctccacagcccggaccacatccggacggctacgccagacggcaggggcgggaacgccacgcctgacggaaaaatcttcttccacatacaggggcgcttccagaatgggttccggaagatgttctcccaaagcctccagggaaacatccttcgcgcgcagaggtcccaatccggtccggaacggctttttcaccaaatgcaggtacaggccgggatgttccggatccggacgccaggaattcagctgggggaactcctgaagcgcccgggacagttccctcatgcggctttccgccagccgctccatcctgcgtacggaaccgcccgcgtatccgtccagcgcggacagggaacgcaccagtccctctttcacgtgatccggaacggtaaacaacagccgtccggacatcaggctgtgagagtaccgctccaccatggggaggcggacctcccctccggccggatcccaggcgcgctccgcccgtatgcgttcattcataccaaccgtctctcggagcattcccataaactcggcagtgtccgcatcctccctcagcgttttcttcagcaatccggcccggcgcaccaattcctcaagaggttccggaaccctgtcaggcattgcggccccgtaacgcgcccaggaagccaccgtttccggtacggtgtcatgatccagatgggcaaaaaaatactccttggacagctgggacaactcttcaatcagttccgtttcccctggaagcttcctgcggcgcggcacacgttccaaatgtttcaacatctcccaagcgccttccggggaaagctgatccgtgcgcatcagccggtcccatacgacttccgccttgtcttcgatcaaagccaggggattggccgtattgtgaagcctcagccggtgcattaccaaccccttggctgaggaaacgggcaaattatccgcatccacgcccagcctctgtacggaacccacatacttttcgtgaatattcatgcgctccaacagggcatcacggctcatcagcgtttcagcggcaaggcgcccccggcccgtcacctccagacgatccccggaccccaccgctccgcgcacgccgtaaccagctttcagcatatccgccaccgccatggccgtcaggctgtcatacagacacgggagtcgccccccctgcacgttttccaacccggtggtcagcctcagataattggtatcccattccggccgcccgttgcgggcatgccattcccagctacggatcaaatccctcttagccgagcaggcggcagaaaacatcatggaaacattggccatcaggtccgcttccgccgcctcccgagaaggatgccagtccgaccaccttccgttgggatactttactctccacagcctttccgcaccttcccctccgggtgaggactggaacaggcgcggggtcagcaggagaaggctctccaccgctttctgcgtccccggataaatacgcggcgaaacctgttccggaccggcatgcagccgcggagcatccagcacagaggcataacgggccacgttctccggcgccacctccagaaaccgggccagcaaccgcccgtaactctccacgggcgtatagccgcgccccacatgcacgtcaaattccttcatgttgggaagtacgtggtacaggctgttcacatccgcctgggttccccataccatgcggttcatctcccgcagctcagggcttaccccatggcgttcctctccgccaagagaagccatcatgccgctcatcctggccagggcggagggaaggccgtccggattaaaagattcagacaacaaatccggagcattcagcaacgcactcccttcctccagccaccggtgcgccctgctgcaggcgccttcatcccggcaaaacgacttccataaacgaaaagccacatgcccggccgcctcttcatgcggcacgccgtgcacccgttccattactccttcataaacattggctcgtgtccgcaaatccatatccaccgtaacggcgtcccagtccctgccggaaaaacccgcacggcgtcccgcctcttccggataagccagcagcaacatcctgtacggccgataggagcgcttcttcagcctgtccgccacaaacgctcggcgcaaagcatccgcatgaatatcatattcctccgcattccttaaacgccatgggatttcccgtccgttcctgttccggaccagccccaaatcttcctcttccatacggcccagagtctcataccaggaagaaagagcctcctctacggaaggccggccctgcgttcgcttcatctccacaccgggagccggttccgccgcataaataagctgcccgtccgctgcggcggcttcacccacgcggggcagaccggcacgcaacagccacttggttctggccgtaacataatccggatgaggaaaaagctttttcaacaccgcttccgattcggggaaatcccgcatcttccaaggctttgtacgtacaggagaaggcaaatccaaaaaatctctcacatcctgttccgttttcaaaaaaggctctccggcttcatccagggcgcgagaccactccaaagccttcctggaaatgtacaaagacccccacagcggagaattacgcagggacttctgcaacaattctccggcacggtttacatcctcctcctgcaaaatccgggaaaccgtttcatccggaatgccgaatacttttagaggggaaccgtctccaagcagcattccggcatggcggaaatggttcagagcgacctttcccgcgcctatcagcaggaaaggcatcatcatgacggcctccctcaactggtcatccgcggaagcctgtctggccttccattcctcccagtccacgccggacgccttattcgtaagagctcccacgccttcctgaacgaccatgggcgtcaactccatcaatttattttccgcctccatcttcacggcatccgccgcaacggctcccattccggaaaaaaacgcaccaggattccctgatgcgggcctcgtggcccggaacgcccgcattccctgccccagcatcttctggcccagtttcgtcattccgaaagaaagcaaggtattcaccccgccggagacgacagctccccccatctgagcatcaaacacgccgtccgggttcatgctccgggcctccgccatatggcgccccgtctcccccgccatcaacatgccaagcccggcagggccgcaaaacgccaaagccgtggacgctccctgctgggccatgtccaccagcatctcccggaaccagggggaatcctttcccccacgcagcggggcaaactccatcctggcaaaattcctcagttcttcaaaactccgggaataattgtccagcgcctccttttcccgtccctccggcaggagccatgctgcgccgtttacggccagctgggccgcattctccgcaacctctgccgcaccgcgtttaagcgccccccccagggcatcccgaaaggcgggacgggaacgcaaatagggagccatcatgcggaacaccttctgacggtctccatcccccagggaagtcaggcaatccacggcgcgtatgacgtccggaactccggcaacggctttccggttcagctgtatggcgggaaaaccttccttcaccggctcctcactggctaccagcccctccaatcccttgtggatgatcccggcggcatccgccagacggttcctgtcatccagagcatcggatacggccctgcccctcaattgttgcgccacagcctgcaaatcttccggccatgcggaaatggcttcccttccccgttcgtcaggaaccgttccgccaccggacagagtacgttcatactcttcctggtataattcaaataaagcctccctccgggaaaggcgtacctgattgtgcatggaaactgccacgaacaattcgtcatcagacttgccggacgctccatactgccgcgccacctgttcccggatactcttccagtccctccggatacgttcacggggaatcgccccagaatccgccacccaggactgcatgacgcacgcggcaattctttcccggtccgccgtcccttccggatacatcgcctccgctttcagcctcacttcccgcggaatggtcatcacatcccccgtcaatacgctattccaatattcttccctttccgactcccgttccgggattttttccgtgccggaaggtacggagaatgctgcgttctctttccgaatatggctttcccccacagttccgggaaccgcttccggaaaactcccttccagcgggagcgcccctgtctgttccctggttccattatcttccatcatcactttccttcttttccgttattcatatctgaaaaccccacccagcaagcatcctggaagcgtttctctttctcaaaaaccttttccatctcctcagtcggctgctccggggccctcttcaccgcctctgccaattccgtctggacacgcttccattcctctgccgcacgggcatcctcaggtggcccccatgcgccattccggaacatggcggacaggcgacgggaagcagcgcggcgcaattcgcggggtatgcccaacatcacctcgcgccgccggagaagcctttccacctgaacggcaggcaaacctgaagtggccacttctatcagggcgtcagcatcttcctcccctccgcaatcctcatcaatcagcgaggtcatgcggcacaacagcatatcgtcctccggaatgctgataccggaaaattccgccgtctgcctccggtcacgggaagccgtataacgccttagctgctcggaactgatcaagccatgcttttcagcattcgccaatccgtcatcccgcagcaacccgccgccggacacggtggccgccagagcatccgcataacgccgcttcaactccccatacgctgccgcagcctcttccgccaccttcttttcctccggagtttccggcatcttctcctgccgggaaacgatgcttacagcggccgccggatcacggcggacctcctccaccgcccggttcagcgctgcgcgggaatgcgcttcctccgccatgagggaagcctcctctcccgttacaaatattccgctgccctccttaatcctgcgttcggccagagcggcctctccctgctccacggcagactccacccccccggcccaataccggcgcgcctcctccaactgccccagatgggacatcttctgcaaataaatgctcccggcagtctccagattctctctcgccatggccacgcgctccctcaccgggccggacatacgggcaggcagataggaaggaagccgttctgacagcgccttcttccatctctcctgaaggtgttccgaatcccctccggcttccagctcccgcatcacgtcctgttcaaaacggtacatcccgtcacgggcctgcgcccattggtaagcatccctcacctcctgcatttccttcagcgcggttcccgccactccggacacatccatcacgcccgccgccagatcccgcacactggcggcctgtgcttcaaaagcattcaacggaatcacgccggacaaatccggagccacatgcaacattccaaaatcctgtattcgtatagccatctttaacggcttccaagctaaagagcggatggaacgcacggcatccattccaaaccgtcaccgtccggcacttgccgcttgccaaaaccgggccgttccaacacaatcacccctatgacccgcattcgtttcaccgccgcatatgacggacgcccttatctgggctggcaaagccagccgggaggccgtaccgtccaggacgtgctggaacgagccttttccggactctttggaaccccctgccgtatccacggttccggcaggacagacgccggcgttcatgctctgggccaggtttttcatgcagacgctccggatacccaccgcattcctgcggacaaatggcctgccgcgctcaacacgcgccttccccgaaccatccggattacccatgcggaatacgttcctcccggtttccatgcccggttcagcgccacgggaaaaacctaccgttactgcatttcacgcgcacccatcctcaacccttttgacgccgggctggcctggcaccgcccgctggcatggagcgtggatattctggaacaggcggtacacctattccggggaacgcatgacttcactgcttttgccgccctgcgcggcaatgaaccgcgccctattccggagggttacttccgccgaaccatcacgcagacacaagtggcacagacaggggaacatgtcttcatcacctttaccggaacgggcttcctctacaaaatggtgcgcctcatgacgggaaccgcccatgaagccgcacgtggaaaaataacgctggaagaactggctcgcctcatcaacgctccgctcccggatgacaaaagcccgttttgcgccccgccggacggactcacgctgatgagggtccattacccggaagaaacgttcggagacaaaaagaaaataaactgaaaacagccgtccttctagacgcgtgccgtaccgtacagcccttccctcctgatcagcgcctccactttccggttcagatggggaaccggacatacgcccgaacgcaaatcatgccgtatgcgggtggaagaagcgggttcatccccttctatgaaaagggcgcgcacccctttcctgggtgatggaaccccgccgcggcggtaaacaatgaacgtcaccaggctggacaaatattcccagcgtccccactgttccagagaatcccactgatccttgcccatcagccagaacaattctgcaccgggataacgctccgccgtcctctcagccaccctccacgaccacgaaggaggcggaagttccaaatccgtccggtcaagcacggcccagtccagcccttgaacagccagctcaatcatccggcagcgctggtcatccgtcacggagggggcctgctccttcagcggagacagggaacacggcataaacagcacgcggtccattccgcaatatttccgagcatgctcggccatgcaaacgtgcccctcatgcacgggatcaaacgaaccgccgaaaatacacagcttcaccgtcatccaccagaagtcagagtccttccgttcccttgtaaggcagaaacccgccgatgggaacgcgcaccatccttttctccagaggcaggcggcggaagcgggtaataaaatccgtcaggcggccgtaattgcgctccgtcttgggaatcccctgatggccgcaattcacatccggattataatgcagctccacatgaagatgggccggatacatgccgcggttcgtgccgatagtgcccacctgggtgccgcgcagcaccaactgccccagcacaacgttaatatcgttcaaatgggaataaagcgtctggcagcaaagaacctttccggacttaggttcgcggaaagcatggcgcacaatcaccacctttccccacgcgccccgggcgtccgccgcataagttaccaccccgtggcctacggaataaacgggatcgcccaaatcggaattgcctcctttattgccgttccaatcctcacccatgtgacgggggcttttcagacgcagaccgcgggaccggtaatagccgttgccgtcaggcttccctaccggaaaatcaaaaccgtcacaaagaggaacaagcgcaaacttgctgtcccgccgggccatgtaaacgggagcgctctcgctgatcaacgcggaaccggtcagaaaaaccagcgccagcagtaaaaaacggaaataggacatgggaacgaaagtcctttgtatgctaaacggctccctactccgtatcaagcggaattccccgcatgtcggagttagaattcactaacacgctcccccatgtttcccacttcctttcaacttgacagcaaagcctccgtatgaaagaagggaggagcgactcccgtatttttcaacacacttttttccgcatgaacaaactaaccacactcttcctcggaacggttctctcttcctccatgctgcccggctggaccgcagcaccacccaaaccatacggcgcgattccaacacccgcccaaatcaactggcagcgcatggaattctacggcttcatccactttggcctgaatacgttcacaggacgggagtggggttacggcgatgaagacccgaaaattttcaaccccacggatttcaatgcctccgatatcgtctccacctttaaaaaaggcggaatgaaaggaatgatttatacggccaaacatcatgacggcttctgcgcctggcccaccaaatccacggaccacaacatcaccaagagcccttggaaaaacggaaaaggagatgtagtccgggaattcgcccttgcctgcaaaaagcacggcatcaaattcggcacctacctcagcccctgggaccgcaacaacgcggattacggcaaggacggctacctggacgtttactataaacaaatccgggaactgctgaccaattacgggcctgtctttgaaatctggtttgacggagccaacggaggagacggctattacggaggagccagggaaaagcgcaatatcggtgacgcggaaaaatactacaactttgaaaaaatcgtggaaatgatccgcaaaatccagcccagctgcatcatctggggagcgggccactacggagacgcccgctggggaggctccgaaaaaggccacgtcaattatccccattggagcactgtagggctgaacggcgggggcggaggcaccggcaaacgcggcggagaacgctgggtgcctgcggaaggagacaccaccatcaaccatgcaggctggttctggcaccagggacaggcatcccgcgtcaaatcccctgaagaacttatgcaggtatggtttgattccgtaggccgcggggccaacctcattctgaacgtggcggcggacaaaacgggcagactggatcctgcggatgtcaaatccctgctggaattcaaagaactgcgcgacaagctatatgccagggactacgcgttgggagcaaccgtcacagccagccagacgcgcggcaacgacaaaaaattctctccctccaacatgacggacggcaacattgaaacctactgggccgtggaagatgacaacctgacccccaccgccgttattacgctgcccaaacccgccactttcgacgtcatccggctgcgcgaacaaacacgtctgggacaacgcgtggactccttcaatattgacgctttcgtcaatggcaaatgggtttgtatcgacaatgaagggaaaaccatcggcaaccaggtcatgcgccgcctgaaccgccccatcactacccagaaactgcgcctgcgcatcacgggcagccaggccactccctgcatctcggaattctccctcttccgccagcctgcgggcgccgtgcggccctccatcttccgccgcggagacaacctcgtcatcattgcggacggcaaaaataaaatcctgtacacgacggacggcagcgaacccaaggcaggatctcccgtttacagccagggtgctaaatttacggaaagcggcattgtcaaggctcgctgccaattctccaatggtaaattgggccctgtcagccaggccaaattcggcatcagcaaaaccggatggaaagtgaaaaccgccacatccgggaatgcggcggcggccatagacgacaatccggaaacctcatggcttgccaaggcggaagcgcctcaatcctttgtggtggatatgggaaaaccgtaccaggtttccagcttctcctacctgcccagacaggatggaaaaacctccggcatgacggataaataccaatttgaagtaagcgcggatgggaaaaactggacgaaagtggcggaaggggaattctccaacctgcgcgccaaccccattgagcaatccgttaatctcaaaaacatgaacggacctgtgcgttacttccgcttcatcggcaccagttctctggacggcaacagcgcttccgctgcggaaataaacgttttcggcactcccgcaggcaaataaaaacttccctgacttttctcaccagggcattccggttttttacggccggaatgccttttttgcggcacaaacccatttgcaaaacaggctccggcagacaaaccggcatcaaggaaaatgggaaaggacaggccagaattccgtccaactccccctgcagcgcttcaataggctgggaatgtcccgtatatcgccgcaacggccaaaagtccaaagggacggctcctgcatggctgcctttttcagccaccgccggtatgcggaacatattgaaatcggaaaaagccctgcaaccccatgccaacggcagaaccccgggaaaaacgcctgccgactgaaatcagccacgatatcatctctggaaggcttctgttccatttcctgtttgtacgaacaatcttctccctgccgtcggaaaacctggcgcttttccttacatcgtaaaatctattttaagcaaacaacgggaaggcccggtcaactcagcgagggatttccgcaaaacagaagctttccttttcaaaaatcaggtatgaaaaagggcgcatccttttggatgcgccctgtgcaaatcatgcaggcggcgaatttactcctggccgctgaaatcaggcgtgaggatcaggaactggtcgctgatgtccttgccccttctcttgggaatgaaggtatcctgaaggttgtcgttgtcgtccagttccagggtcttggcactctgggcagtcgtgaaaatcagaaccttgccgcggaagctttccgggtcaaaacgcacggcattgccagccacaacggtgctgccgtcttcaccaggaagcacggaagtgaccatcaggggatattcccccacggaacttccaatacccactttcttgttattgtcacccttgcgcatgacgtaggaaatacccacttcaccgggggtcagggcctgaccgtcgtaaatttcaccgttgggagtaacggtggaaccgccggaaggagtctgaaccttggcgtagaagttgctttcggaaacagactcattgcccagaagctgacggaaatagtcattggaagtatcgccctgaagtgcgcccaggccgctcatataattatgctgggcaacaacgcggtcggcagtgatgtcatcggggaaattgcccagtttgctgttggatttgaactcgttcatcgccacgcccacgttcttcatgttggtcagggcctgcatctggtcgcctttgttgatctggttcaggataggaccatatgccacggaagccagcagggcgataatggcaatgacaaccaagagttcaatcagggtaaaccccctgcgtaactggtgtgttgcaaaagatactttcattgttggatatgatggaatgtttacagtttaagaaaaccgtacgtggttatctatgttcgtttctactattaacgcgatttcccagtcaggacaagcatattctcataaaaatcttggtcctgcaaggagtgaaaactctgccgcagcccccctgcaaaaggcccggaaaataccgggccatgggggaaaatcctacctgccgctgccgaaaaaggaactcaacccttccaaagctccggcggacggcctgtcctcctcggcaatcacctgccgctggagttccgcgatctcttccagccccttgcggcctaattccagcatccggcacatctgatccgccgtgaacacggcctcttcaccggacccctgcacctccacaaactctccctggtcggtcatcaccagattcatatccacttccgcatccttatcctccacatagcagagatccagcagagcctctccctccagtattcccacggatacggcggaaaccagcctcttcatgggagactccgccagctttccttccgcgacaagcttgttcacggcaatggccagagctacggaagccccggtaatggaagcggtgcgggtaccgccatcagcctgtaaaacgtcgcaatccacccaaatcgtgcgctggccgattttgcccagatccacggccgccctcagggaacggccgatcagacgctggatctcgctggaacgtccgtccagtttccccgccgtaatatcccggcgtttacggtcaagcgtggaatagggaagcatggaatactccgccgtcagccatcctccctccacacgctgaaccttcatccagcggggtacatcctcctcaatcgtaacggcgcaaatcaccttggtgcgtccgaaagtcaccagcacggaagccgtggcattcggggcgatacccgtttcaaagctgatcggacgcaactggtccacaagtcgtttatcctgacgttccatgcggggaatcatgacggatgccgtcatctttttcaaatggaaagatggaattcccgttccaaaccgctaatatccctcccatgaaacaccctcgcacccgtgtggccgtcattgacgtggtggccctttcccgccagatgatggaacacatgccgcggctctccgcctgggcggaggggcggagcgtttcctccttccccccggcctttccggccctcacctgctctgcccagagcacctacgtgacagggctttccccgcgggagcacgccattcccggcaacggatggtacaaccggaacatgtgtgaaatccaattctggaagcagtccaacaagctggtgcagggcccgcgcctctgggagaaactgagggaacggtacggttccggcttcacctgcgccaaacttttctggtggtacaacatgtattccacggcggactggaccatcacgccgcgccccatgtacccggcagacggccgcaagatcttcgacatttacacccaacccatggaactccgggaaaccattaaaaaggatctgggagaattccccttccccaccttctggggccccatggcagggattcagtcctcccaatggatagcagactccgcccggtgggtggaacggaaacatcgccctgacctcagcctcatctatctgccctatctggactatgaccttcagaaattcggaccgtcctcaacccaggctgcccatgcggcagaggctatggacggtcttctctgcgacttggtcgactttctggaacgggaaggcgtcacccccgtcgtcctcagtgaatacggtatttccgacgtatcccgcagcattgccctcaaccgcctcttccgggaacggggatggatcaccgtcaaaccggaaatgggtacggaaatgctggactgcggcgcctcccgcgcctttgccgtggcggaccaccagactgcccatatctacatcaatgatccttccgtaaaagaagaagtgaaagcactgctctccgccacacccggagtggaagaaatcagggaaacggacttctccggcctttcttccgcggctctggaacgcctgccggaattcaccgccgtcgcagccccggatgcatggttcacctactattactggatggatgacaccaaggcgccggacttcgcccgctgcgtggacatccaccgcaaacccggctatgaccctgcggaaatgttctttgatccgggccttaccctccccatgttccatgccgccgcctttctgctgaaaaaaaagctggggttccgcgccctgatgaaagttatccccctcaatggcgaccaggtgaaaggctcccatggcagagaccgggtgcctgcaaaccagcagcccgtattcatcggcccggccttcctgccggaaatccatgctgctgaggatgtccatcaagccatcctctccgtctttgaaaaagaataatagcggttcccctcagcgggcatccggacgggggtcatattccaggccgggaacctcccggtaatgaatgccgtcccacaggacgggaatgcagcagaaaaaccagcttctctggccgtcgtctcccttccagtgcccgaacacgctgcggatcaatacacggttcaaccccttgcggagcttgatctttacaggagggcggaaaaaatacccttcccaggtcagaggagcttcttcaatgcgcccctttccccaccccgtccagggcaggctcttgaaaggccacctgggagggttcacgcgccttccgttcaaccatacgtccccgccggaaaaatcccagcttccctgttcaggggcgcgtgcgctgcggtacccgcctgaatgcccccacatgccgttcaggccaaacatcagccacacctcctgctccctggggctgcggatgaaagtcagagcatagcaggttccatcctcctttccaacctcccttgacatcagcgtgggccagtggtccgtccggtactggttccggtgcatgttgaacatcgcaaaaagatgcctgacatgtacggcggcgccgtaaacaggagtcttcttccaggccagtatcctgtccctgtccctgtaggaaggggctattcttctttccggttcaaaagaggtatcattcttcccccggtggtcgaatggccccaccaggctccaggcaacatccgcctgtttcacataggcaaaaggaacgccttggaaaaaatgatcacgatggaaagccaaacgctgttcaaactcccggaattccttccagccgtccgttccccccaggggaagctgggccatataatccctcctcttggtagcgcttccgcgccagacacgctctgcaaacgtcaatgcacaaggataaaacggatactgttccagcacccgcctctcactgctcaggtttccgtcgcaccacacgggcatgatggcccccaacgccttatcatccccttgaggcacctcgcagggctgctggaaaaacacctggtacacgccggactgggaatccgcccagtcaatgtaaaaaccattgctgtcgatgcgcttcatattcttatccatcctggcgccggactcgttctctccccagcacatcaatacggaatccttatcgtgcgggccgcccggagaccacacgaccacctccttgcccttcccgcggatatgctccgccatacgtgggataaaatccttcatggaaatgtgcgcctcgtcggaccccatgtggaaaaacctcccgggaaacagggaaacggcctcgtccacgacatccttcaatatggaaacacccttctccgtctgcatgccggtcttcatggccctggcaaaaggctggctgtgtcccggcatgtcaatctccggaatcacctggatattcagccgggcgcaataatccgtcagatccttcaattgagcctgtgtataaaaccgccccgggagccgggacttccaatgaaaagccccatccgtcagggccggatacttcttcacttccagcctccatgcgggatcatccgtcaaatgaagatgcagcgtattaatcttatagcgggaaagacggcgcatcacctccttgatcaaggcaggagacatgtaataacgccccacatccagcataactcccctcaggacgaaagcgggtttgtcactaatccgcacaacaggcatggcaaattccccttctctattgaaaaccagttgccgcagcgtttgaagagcgttaaaaaaaccgccaaaacttcctgccctgacggttgctttccccaatccgacggacaggtcatacccctctcctttcatcctggcgtccggaaacaattcccatgtcatggcaccttcagcagcccccccactattcagggaaccctgaatgccggaagtcctgaatatgtccttgatttccttcatcaaatcatccctgccaggaacatccggaccaaccttcacctgaacgctcctgaaacctgcctcgcccgcgcccctgacgactttggaaggatatggaataagcgcgggggaagaaaactccggcacaggcgcggtaaccacccctccggccagcggcccccatgaaaaataaatcagcaaggcaataaaaaaccgtacgggaatgctgaacactctgaacaaaagcattccttaactacggcattccatctccgctcctgtcaaaacagggctttctcaactgggaaaccaaatgcttttcccatcctctccaacaccgacatgcttattcctccatatcgctgtttccctccgcaaatccggcaataacgaacgggcgtcttcgctatcgtcccgttcattcgccagacagactcctccagtcagtgcaaacgttccagcagggcgtccatgtccatgtaatcctgcccgtgaatcaattcgccgagaatgggcgcatcggaaaactcctccaccatgctcctgttcgtcacgcaggcagtatcccattcatctttcacattattgaacacgatgcccagacattccaggccgcgttccttgattgcattcagcgttaacagggcatggttgatggctcccagcttgttgccgatcaccagaagaacaggcagcttgaaatccgcagccatatcgctgaaattccttccggggccaatcgggacttcccatcctcccaccccttccaccaccacgcactcatgtgcggcggacaaagcgtcataagcccgcaggataaccttttcatccactttcgtattctccagccgtgcggccacataaggacacgtggcattcctcaaaaaaacgggattcagttcatccagcgtcagatccttcggcccggcttcgcgcaaaaggcgggcatcctgcctatctccgcaggccacgggtttgaacccggcggcattgatgcccgcttctcttagagacttgacgatcaggcagctcacataagttttaccgacttccgtatcggtaccggtaacaatgaaattcctcataacggtaaatattcagggatgggatcttctaatctcctcaagctgcccgcgggaaggcacgccgtcattcgtggtcacccagtgattgatgaaagaccagataatcacggccagcaccagacagaacaacttggcaggccaattaagcaatagcagttttttcattggaagaagaaatattcagcagctcttcaaggcgtcccttcaactgttccggagtcaggttgcgttccagcttcccgcctacggccaacgctatagcccccgtctcctcggacaccaccaccaccacgcagtcgctctcctcggacatgcccacgcccgcgcggtggcgcagccccagggtacggtcgctcatttccttctgggaaacagggaacacgcaggcagccgcagaaatgcggtcgccggaaatcaccacgcccccatcgtggagagccgtcttggtatggaaaatcgtcagggccagttccggagaaaaaatggcgtccagcttcacgccggaatcctcaataggcttcatgctgatgctcctctcaaaagcgaacagggcgccgaaccgctggttggaaagcttgcttaccgccttgcagaaattatccaggaaatccacccgctgaagcttggcgaaggaagaaaaaaacgggtggcttcccagctttgccagccccacgcgcagctccggctggaaaatcaccaccagagccagcgccaggccgggggcgaaaatgcgcgtcagtatccacgaaataacattcagctgaaagaaaaaggccagcaccaccagggccagaaagcaggcgaacagccccaccatgatgcgcgcgccgcgcgttgcgtggaaagcacggtaaatctggtacaggaacacccacaggatgaaaatttcaacaaccgcccggagcgcatccttgatcacaatccagtcccacatgcccaacaggctacacaacaacccggccgaatgcaataccgatcctctcgcgttgccggcaggctccgggaatttaccgttcatctcagttcccgaatttgaagacatctctgtacgttccggagacagatagaagttcttaaaaagaagagcggttctttggaaaataaataataacaataaataaaaattggattaaataaacaatgttaatccgcataaagcaaggcttcagaaaactgaaattctctctggatttacggcatgaacttgcggcggatacactgaaaaaccaaacaaaaaataatcaccagatgatagcaatcgaacaattaaaagaagtagggaaaatctggctcgcctgggtaaggcttcaggatcatgatcctgccgaagtcacgcaaatatttgaaaaacttaaaggagaactggatgtaaaattaggaagaggctggcaaaaatatgacccggtaataaaaaaaggaaggccccaatcctataaaaaactctttcaagaattggatagcgacagtcaggaatccgcaaatgcattgatcaaatatttcaatgagggaatcccggaagacgctcctgtctcgccagtcatacacctcattctcatcttatgcgtctgtgaagtagggcgtggatatggccaggcgccggacaatatgctggcttatgcacatgatctcattgattatcccaatctcacatggggctcactgctggacacagcgggaagttccccggagttcgcatttctatgcaagggtgattccgatgaagactataaggaataatgcatgagcaccgtccgcaaccgactcaccggtgagcctcccgcacggcatgggttccctgtatccgggcacagggaacttcacccccatcgtcggcaaaagggacagccgcaggcgggctcgggcaattcagaaacataggcggcccttcctgccttccatctgtctcaatcctgcggacatcaaaagttggtgcatcaacttttctcatcacctcaatttccgggccaaaaacctggccgccgtcatgataacggacaccttccttttccggaaaccgaactgccatcaacaggaaaccttccggaaacgctggattaccgccgcatggggcagatgccccagagcggcaccaggccgtcctgcatctgacggcgggcatcaaataaaacgcaggcggcccctacgcccggcagcctcagacggcctgcccgtccataatcgtaataatgcggtcccctctccgtgccagatgttcgtcatgcgtcacaatcaccagcgttttgcgggactcgtccgccaggccgaacaaaaggtccagcacctccgcgccgttcttccggtccaggttcccggtaggttcatccgcaaaaataatgggggcgtcgttcgccagggcacgggcgattgccacgcgctgctgttccccgccgctcagttcgctgggcaggtggttcaggcggtgggacaaacccacgcgctccatcagttccctcacatattccacgcgcggcctcctgccgatggaggaagccagacaggcgttttccagcgccgtcaattccggcatcaacagataattctggaaaataaaccccatgctccggttccggaacacggaccgggccgtggcggacaaggcgtaaatatccgtgccgtcaatcgtgacctttccctcttgcggcgtttccaatccggccagcgtgtacatcagcgtggtctttccggccccgctgggcccgcacaggaacaccttctctccggcggcaatgtgcaaatccaccccatgcaggatctcaatggacttcttgccgatggaatagctgcggtggaggttggaggcggtaatcacgggcgcagtataagaaaatccttgccgtattaaagttctatgttgtctataagacgcacgtcgccgaaatagacggcggcggccatcagggccggcttccggttctccgccagcggctgcatggtctccgcatccacaatctccagataatcgatgcgcgtgccgggcacaccctcaatcatggcggcggcatgctccttcaccttggaggcgtccgccccggcctggaactcgtcccgagcctgaagcatagcctgccgtattaccacggcctgctccttctgctccggcgtcaggcgggcgttccgggaggaataggccagaccgttgccatgccttacaatctccgccccgtgaatgcgcaccgggaaatccaggtcgcgcaccatgcggcggataatggcaagctgctggtaatccttctttccgaaaatggcgtccgtgggctgtaccaggttgaacagtttggcaagcaccgtgcagacaccggaaaaatgccccgggcgggacgcaccgcacaatgttgcggacaaaaagctttcttccacggcaatgctgcgttctccggaatacatttcttcaggagcaggggaaaacacataatccacgcctgctccttcgcacacctccaaatccttttcaggagtccggggataagtctgaaggtcggaggaattgttaaactggataggattgacgaaaatactggcaaccaccacgccatcctccccggccaacttgcgcgcctgttccagcaaagcgcggtgtccggcgtggagggcccccattgtggggacgagaaccacatggtcatgtttgcggtggtgcttgaggagggccgccctcaactgggccttggtggaaaatgtttgcatgcgcctaaagtgaccccttgatgacaaaagttcaatcctgaaatattgctagaaggttgacgcatgccattccacatgtaaactggtaaagtcagaagacgctaaaaattatgagattcttcaaaacagcattaggtgtatcagcagcaatggcattaagcgccacagccaacgctgaacttaaggtagcgacggtggatgtgcagaaactcttcgccgactactacaagacccatgaagcccaggcggaagtagacaaggctgcccagacggtgcaggaaaccaacaacacccgcgcggaaaccatcaaaaagatggaagcggacttcaacgacatggtcaaaaggcttcaggatcccatgctgaatgaaaaggacaaaaaggagctggagcaaaaggcccagatcaagcgtcaggaagtcattgcgctggaacaggaacgccgcggatttgtggaacgccaacttaaatcccttcaggaacaaatgaaagtgcgttccgccaaaatcatgggagaaatcacaaaaatcacggaaggcatcgccaccaagggcaactatgacctcgttctggacaaaagcgcccaggcccttcggtccaaccaggtattcgtctacacgaagcccggcatggacattactcccacagtgatgaaagaactcaacaaggacgcccccgaagggtttgacccctccaagaaaaaggctccggccgtccccgccgctcccgcggccccggccaactaacccttgacattacccccgggaaggcggaatcatatacccatgaagcttacacttgaagccgtggccgccctcaccgggggaaaaatcctttccggcgaccccgaactgaccgtattcggggtcgcttcccttcttgacgcatcccgtgaagaagcctccttccttggcaatgaaaaatacttccaggacttcctgcacacctctgccggaatcgtgctggtgccgccgggtctgcctgcgtatccggaacacgccgccttcgtggaagtggacaacccctccatggcattcaacgccctggtgaaatatttcatggcttccgcctaccggttcacccccggcattcatcccacagccatcatcgaccccacagccagcttcaacccggacaaaatccatgtaggagcctatacctgcatcggggcccactgcgtaatcggagacgggacggacattggcaacggctgcgatatcggagacggcgtcaccatgggggaaaactgccgcctgcatgcccatgttaccatcagggaacgctgcaaactcggcaacagggtgaccatccagcccggagccgtcatcggttccgacggattcggcttcctgatgggagacaatggacgctacgtgggcattgaccaggtaggcattgtggaactgggggatgacgtggacgtaggggccaacactactattgaccgcgccagattcgggcgcaccattgtgggggaaggcaccaaaatagacaacctgatccagctcggccataacgtcgttgtcggcaggcattgcatcatcgtcgcccaatccggcatagcaagcagcaccaaagtgggggattatgccaccatcgccgcccaggtcggcatctcaggacacctcaacatcggttccaaatccacgctgggcgctaaaacgggagtcctctcggacattccggaaaactctacttactggggcatgccggctttcccctacaaggacgctacccgccaatacgccgccctcaaaaaacttccggcactgattaaggaagtccgcgcgctcaaaaaggagctggattcttccggcaaataacgggcaccatatcgccggaacgctctgcagcccctctccgtgtttctgtttcccgccgcttcaggcctgtcctgtcccccagcggcggtgcagaaaccgttccagaggagaaaacagaatcttgtcggacagtagcccaatcaccacaatcacgaacatgatgcctacgacctggttcatcgcgttcagttcgcggccgaaatgcagcagctggcccaatccgaacccggtcaggatgggaacaaaaatttccgcagccatcagggagcgccaggcaaaagcccatccctgcttcattccgctcaccacaaacggggcggaagcgggaagcgtcacatgaatcaggcaataaatgggtcctgctcccatggtgcgcgccgcacgggcataaatgggcggcacgttccgcatgccgttggccgtagccaggattacggaccacagcgtccccataatcaccacgaacagcatagccccttccgtctggccgaaccacagggttgccaacggaacccagcacacgctgggaagagcctgtaaccccagggaaaccagccccagagtattctgtataagctggaaacgggagcacagcatgcccaagggaatccccgtcaccaggccgattccataccccagcaccagccttttcatggtaatccatgaagcctcctccagagacccgtcctgaaatgaagagcgcagatactcccatacttccagcggagagggaaacaaataaggcttccagaccctcaggtcgctcaaatactgccatgcccagaccacgaaaatgaaaaacacgagcgaacaggcgtgcgccccccacttggaccatttgttcctgttcatgctgtggctcctttcaaatcacgggtaatgcgggaggacaatgccgccaaatcactgctgttgatatccctgggatgagggaaatccacgaaatattcctcacagacgcgccccggatgcggagtgagcaacaccacgcgatcccccaggcacacggcctcgcgcatattatgcgtaacgaagacaatcgtcatgccgcagcgtaaatgaatctcctgaatatcctgataaagctgttcgcgggtcatggcgtccagggcggcaaaaggctcgtccatcagcaaaatgcgggggctggtagccagggcgcgggcaagcgccacgcgctgcttcattccgccggaaagttcatgaatatgagcatgggcacactctttcagccccaccagttccagattcttctccgccatggcaagccggtctccccgagtcagtccgggcaccagattcaagccgaacatcacgttccccatcacatccagccacggaaacagggcggactcctggaacatcacagtgcggtcccgtccgggtcccgtcacaggctccccgtccagctccaccaccccggaagaaggaaactccagccctgcaatgatattcagcagggaagtcttcccgcagccgctggcccccaccaggcacacgaactcgcctcctctgatattcaaattaatgccctccagagccaccacctttccgcgcctcccgtcaaacaccttgctcacgccggcaatacggagcttgcagcctccggggccgcaatgttctgcacccgcaatcatcttccgcccgcctccttcgccatggtcaactgttcctccgccgcctccggcaccaccaggccgcctatatccggaacctctttcataaatccggcctgatgggcgtcctgcacaaactgccggagcttgggaatggaaatcctgtccttgatgacaatgcttttccaagcctccgcaatcaatgccgggtctattctggaatgcgtcagctcctccagctccctgaccacgattaactgggcctcatccggatgcagccttatccattcgttcagttcctcatgcgcctgcaccagggctttcgccacctccggcttttccctgagaaactccgctccgcataccagtacggtcgcgatggactccttctcgtccaccagcaccctgcctcccgccgtcagcaccaggcggctcacccagggttccaccgtccacacgccgtccagcttgccctgccggaacaggctgagctgttcggggttgggagtcggcagaatcgtcacgtccccgccgcgctgcgtcacatgcaggccgccgcgggaaaaccaggcgcgggcggaaacatcctgcgtattccccagttggggagtagcaatcaccttgccgcggaaatccgcaggctccttcagcgaggaatccttcggaaccaccagggcggcgcctccttccacagctccggcaatcatcctgatatcctccccgcgggaacgcacaaacgcattgatggccgggctgggccccacataagccagttcaatggaccgggcgaacacggcttccatggcgctggggcccgcattgtacacgtaccagttgatcctgacatcctttccggtagcctccttcagccgttcttcaaaccaccccttcccctgccgggaaaaatgatgcgccaccaggccctgcacatgtgtcacgttgggaaaatgaccgaagtccaactccacgacattgggatcttccttctccttctttccgcaggaaacagccagcaggcataaaaacagggccggtaaaatcatcaggaatctggaacgggtcataagcaaaaagaatgggatactgaggcacagccgtttttcccgcgcctttcaggcaccgactagcagaagaagccgccggaggcaagaagccgaaggcaacaactttgtcacaatgtggacagcaaaaatgcccgttttgttgaaaaacaatcccggttccggatctgaaccgggctttattgacaaacctgcacgttcccgttacaaaagcaccattcccaacccgccatgcaatcctcccccgaccagccctcatctggagcatggctgggccttcctccagatgaagaacgcccggtaagccggggcgccaggtaccgttgcatctttctgatgctcctgtactgggccgttctttccgccattccacaaggcgcggaccgccttgcagaaataggaacaaatctccctctctggatgggagccctggaactgactcccttcctgctggtgccggccttcctgttcctggcggtgcgaacaggcgcccaatggagggccttgatgataaccgtatatgcgggactgttcctgaacctgctgatgaacatggcgcttccctcaggcgccatatggggagaccttcccgcagccagcccctacggtacgcttgtctggcccggagaggaccaccgggaatggctggtcacgctgccccgttttccccaattctgggctctcgtcatctatgtcttcctctccggcagcggaaccccgcccctgcttcgcctgctggccctggcctggtggttcctgctttgcgtggcccccgtgaacacgggcatggtggggtatgcggacatcctggggcctctggtcatcatcgccctcgtcctcggctgcatgcacctggcggaaaaaagagcctcccggcaaaccaagggctaaaaatccagggcggccattccacggaagaaacagccgccccaggactggcggacaccacccggcggaaaacttcccgatgccatccgttatttccagattacttcaaaaatatttacggaacttcccttcttcccggtcaggccgagggccttcaccggttttttgacggatttcaggctgaacgtattcactttcctgcccttggccaaattgcccacgggaacccaccgtccgtcagccccacaggccagcacggaagcctccttcccgtcggacaggacaatgacggaacccgcacggggaaaatcacagggaatctccgtcctctccggagacagttccaccgggaggaacgttgccaggttgaaatccccggcagctccgctgtcggcggacttcccacccttgttggcaagattcagccggaactcttccagagtcacctcctgcggggaggaggaggcgttcaacagcctgatgcccttgatcactccgccaatatccgcggaaccgtcctccttcaacggaacctccgcccaggactttccatccatggaaatgaacaacttggcccacttcatatccggcgtcttcaaattgacggaggcggactccacggacactcccgccggaatttgaaggcccagggactttttcggcggcaggggatgcacctccatgatgcgcttcaaggaaatatccctgtctcctgcttcaaccacggcattcctgaacgcgggagcatccgtcagtacggaaggcgctgcaggagcattcaccttgaaatcccggatggccgtccacacgtccggcttgcctcccggaaccccctgcgccgtagcgcggtaacgcacaaaccggccttttttgccatttccccggtactccacgcgaagcccgctggactccggcatcaggggagaccaggactgcccgtccagggaaacctccaattgtcccctgttcacagcgtccgtatcggaatcattgcggcccatcacaatggaaacggtgcgtatctcccgtggaactcccaggtccacgccgaaaaagtcacccttcttctgaacctctttgcagtaatagaacgactcggggtcgtcatccagcatcttctcgatgccaatcttggacttggtggaaacataaggcttcacacggccaacggcctgcccgctcacgcgggaaagcacgggggtggagcccatgtccagcagttcccgcacagcgggggccatcaccaattcggacggcttcacggcggtttgccacggggaattcttcttggtcacttccgtgacgtgcttattgatggccttgctgatttccctgctgtaacgctgcatctcggcaagcaggcaggcggcctccatggcatgattcagcgctccggcggcattccccgcctctgtggcctcaaccatgcgcatactgttcaccccggctttccccagggattcgaactggatgagccacggctccacctctgcaacgaaagcgggattattagacttggcccgaattgcggccggagcttgggctatcttcgcgaactcggccttcaggcggtcaaacgccttgcttccggacaccctggccccgcggcggcacagctccagcacctgctccaccacgggggcaatctctacggactcctctttgcggtaattgtgcccgctgggccccccgtcgctattatgatcggcaaacgtctgcatggcggaggagcagccggggaacaaaatacggatgctgtccttccatgtcctgtcggaatcataagccttggcgttccaggtcatgttcgccacgctgaacagggaaatcttggaagcctccggcttatccatcggattggaagcaaacccctgcataaacggcatcgcgtccgcatccacgccataggtgcgccccaaaaacagggcatggcgcacgtaatccgtcaccgggaaattccaccagataaacgccggacgcttcaaatacttattaatccccttcaaagcaggagtccggatatcgctcacaatgctggaaccggtccacatgatgcctatatccttgtccagatgttcccccattacctcatggtagcggctaccaccgccggaatacgccgtggggcatacgatcaacggcgtcacatccggttttttgtggataaactccttattcaggtaattcaaaaactccacctggccctccggtttggccccctctccgccgatgtcgtcaaaaaatacggcaaaggaacggaatcccagatcatacatcatctcaaacttcttcacggccgccttccggtccgcctcgccccagtgaatatccgctccgggatgcacggcccagacaaaattcaccttattctgcttcgcgaccttcaccagctctttcaggtccttcgccatatctgcgggataaggctcgcgccagcgcttggaaaaaccgtggaacacgtcatccttcgggccgtagatgtaagtattcatcttatacttcccgtaaaatttgaactggctgatgcgaccttcctgcccccagggcagaccgtaaaacccttcaatggtaccgcggaaaggaacatccggccaatccaggacctccacttccggcactgtcacgccggaagaagtcttctccgccaactgcagcagcgtctgggccgcgtaaaacaggccttcgtcgtcataccccgtcatccgtattccctggggcgtaacgctcagggaataggccccggccttccggggaacattaccggcaggcttgttgcttcctttgatgatcgtcatctgcacaggcagcccgtttggagcgagggaaaacatgcttttcagggcattcacggtaggttcatcccgcgcgcccaacagcttcagggccggaaccgtcacggaaccgccgctcctggtcatcttctgaggaatgggatacaccggcatcttggccgtttttccggcacgggagccttcaggagaggcggaaaaagccggagaagaagactgggcagaaacaggaagggcaaggccggccccgagcgcggcggcagccatcatggattggaaaagtatcagattcatacgtgcaaaaataaaaagcctgtacaggccaggttcacgaaactacgcccggattgttccacttctaacaggctcctctccgtatgtcaaaatactttgccccgcaccggtaacatgtcgcccgccccgctgcaggggatgactccagggacaaaccgcagcgacttttcccgggcaactattcccggcctacagccttgccgccacttcctccaacgtctccacacgggccgtggcgagggtggggacatcttccgcagaaaacaggaaattgcggcctactccggcggcaagagccgcccggatgtcccgctcccggtcacctacggacacgcaggctttcatatccagcccatgcgcggcggcagccttcaaaaacaggccgggattcggtttccggtcgggatgtccgtcatccgcgctgggacagtgaaacacacctgcaatctccgcaccggacgaacggaacacccctctcatatattccgtcaaccgctcaaagtcatcttcagaaaacatgccgcgtcctatgccggactggttggtcgccaccagcaccagataccccttctctttagcctggcggcaaagattcagaattccgggaaccagccggaagtcctctatgcggtgcacatacccgccatccacattaaccacgccgtccctgtccagaaacaaagccttacccgccatatatctcccgttcaaccagttcgcaaaccagatgccccactgcaatgtgcatctcctgaatgttgttcgtggcatcggaaggaacggcaatgcaaaactccgcaacttctttcatctctccgcctccgcggcctgtcaaggccaccgtccggacgcccatccggcgcgccagctccatcgccaaaacgatgttccggctgttgccgctcgtggaaagccccaccagcagatctccgggacggcccactccctccagctgcctggaaaacaccgtctcataaccgtaatcattgcccacggcggtcaggatggaagtatccaccgtcagggccagcgcattcatggcggggcggttcagcttgtaacgccccaccaattcggcggccaggtgctgggaatccgcagcggagcctccgttgccgcagaacatgatcttattcccggccttaagggtatccgtacaaatgcgggcaacctgctcaatatccccggccatggaagccagggctttgaaattgtccgctatccctaaaatctggttcctgatgtattcgctcattccgggctgcttttcatgcggttgatgatattggtggaggaaaagccctccaggcggggcagttcaagagcctgccctccataagatttcacgaactgtccttccggccagaattccaggggatacccttctttggcaatcacgtccggacgcagcttctcaatcagcggcagagccgtatcttcatcaaacggcactacataatcgacaaaatccagggatgccagcaacagggaacgcatctcctcattattaatcggcctgtcctcgcccttcagccgcttgatggaggcgtccgtattcaaccctacgaaaagcacgtcgcacgcttcacgcgccttcataaaggaatgcagatgccccaggtggagcaaatcaaaacaaccgtttgtaaatccaaccaccttcttctcacggcggaaacgttccgccagctccgccgcggcctccggcgtcaggatattgtcgcggtgacgccaggagggcgtctggatatccttctccttcaacgcctccttcaattccgttccggtcacgctggccgttccgaacttgcccactacgatgcacgcggccacattggacacgaccagagcatccggcaccgcggctccggcggccagcgccgcgcccagactggcgagggaggtatcacccgcgccggacacgtcaaaaacatcccgggcctccgtaggaatgcagacaaaatcggaagggctggaggaaggaatgaaaatcatgccgtgttcgctcaaagtgacaatcagattctcaatgccgaattcggaaaacagcctctgcgcccccgccacggcatcctgttcccacccggccatggcaggattgagcgccacgccggtagcctcctggaactccttcatattgggtttcaccagcgtggcccccctgtagcgggaataatccgctcccttcgggtccacaatgacgggcttgcgcgccgcacggcaccgggcaatcacatccggggcggttcgtccgtcaaacaggcctttcccgtaatcggacaaaaggacaagatccgcctccggcaaacaggcatccactcgttcaaaaaaacgggaagccagctccggctccatcctcagcggctgttcctggtccgctctcagcaaatggtgcttgcccgccacaaaacggatcttcacggtcgtctcgtacccttcgcactccaccagctccggaacgcagtgcgtctcttccagaaaacgccttacctgccgcccatggccatcatccccgaccacgctgataaaagtggtgcggcatcccagcgcgcacagattggacacgacattgcccgcgcctcccagcatgcgcgtctcccggtccatcttcatgatgggaaccggagcctccggcgaaatacggctgacgctcccatacaggaacttatccagcatcacgtccccgatgcagagaatccgcacccgggaaaatccgtcaatcaatgtatgcagccggttcatgggagacgcctctttctaccacgccccctgttataaggcaaggacagttgaaccgcgctccggaaccggaaaacggggcaacgcggccgcttcccgccgttccggacggcagaactctcattcagtggcaaaaaataggtcagtcatgataaaaatcttgacctgtaagcaggaaagcactacctattgtctcccgttcccggacgaatagaaaaaggaaaacaaatcatgcgtgaagttaccgtaagaaaaggtgaacctatcgaccgcgctctcaagcgcctcaaaacaaaactggatgttgaaggcattctggatgaaatgcgccgccgccgcgcctttgaaaccccgatggacgaacgccgccgcaaggcccgttccgccagcaagcgcaacaaggtaaaatggcgttacagcaacaagagcgaagaaaccgcttccgaaactgctgaaacacccgcttccgctcctgaagcttaaaacagtattggttcgggaataagaacccaatttccatgagggcaaccctttctcaaggattgccctttttgcttccctctgcacatgaatcagtcagcccagctcttctcccgcgcgcgctccgttatccccggcggagtcaactcccccgtcagggccttccgcaatgtggacggggaccccttctttgttcaatccgccaaaggagcctacatcacggatgcggacgggcgccagcttattgactacataggcacatggggcccggccatcctgggccacgctccgcaacccgttctggacgcagtacatgccgccgtggacagggggctgggctatggaattcctgcgcacgcggaagtggatatggcagaaatgatcacggacatggttccctccgtggaaaaagtgcgcatggtcaactccggaacggaagcaaccatgtccgccatcaggctggctcgcggctataccggacgccgtaaaatcattaaattcatcggctgctaccacggccatgtggactcccttctggtggcggcgggttccggagcgctcaccttcggagaaccggacagcgcgggcgtgcccagggaaatgacgcagctcaccctcaccgtgccctacaatgaccgggaagcagtaaaaaaagcctttgaactccatggaagcgacattgccgccgtcatcctggaaccctttcctgccaatgccgggctctactttccgcaaaatgacttccttcacttcctgcgggaaataacgctccgccacgacgcccttctcatctttgatgaagtcatgacaggcttccgggtcgctcccggaggcgtgcagcagctttacggcatcactccagaccttacctgcatgggcaaagtcatcggcggaggcctccccgtgggagcttttggcggccgttcggaaatcatggactgcctctctccgcttggccccgtgtatcaggcgggaaccctgtccggcaatcccgttgccatggcggcgggattggcccagctccgggaactcctggaagggaacgcctatgaacgcctggaacagctcggagcgcgcatggaagaaggcatccgcgaagccctcaaaaaacacggcagaaattacaccttccaccgtgcgggctccatgttctgcctcttcttcacggaagaggaagtctataatctggaatccgcgcaaaaagcttccaaaaaactcttcaaatccttcttctggaacatgctggaacaaggcgtctacttcgcgccttccccgtacgaaacgggctttatctctacagcccatacggaagaagatattgaccgcacggtggaagccgtccgcatcagtctctccaggctgggttgacatgcccctgatttgaagtgacagctcacggcccttcccctataaggacttcatgagacaaatgacaggaaccatgctgcttctgtcctcagcagtcgttatggtcgctccctgggcgcatgcggaggaaaagacaatccagctcacggaagcggaacaacaggaaatcaagacggcaaacgaaaagctgctgggccttaccctccgtttcctgcatgactcctggccgctggaaatcatgtttcccggagaagtgcaggaggaattccactccattcttcaatgccatcagatgctggagcaattccgccaaaccggcaacctcctgctccagacgccggaccgtaccacgcctctgcacctctgcattgccctgggattaaaccggctggccgtccggatggtagaggcgggcgctcccgtcaatgctcaatccatttttatgcatgacggcacaaaagagccgggagacaccccccttacctgggcgtgcctctcaggcctctatatgaatcccaccgcggaagaaaggctgccgctggtgcacgccctgctcaaacacggcgccgatccggatcagccggggccttggggcgtcaccccgttcatgtattccgccgccctcaatgactccgatccgggtcaggaaaaaatagcgctggcgctcctggacgccagctccccggatctcaagcgcagaatgaacgctcaggcgcgcggagtcggcttcctcagtctgtcccccgccatttacgaacggctcatcaaagccgactgcgatgttaacgaacgcttttttgaaagcaagcaatcacccctccacctggtctgcaccaaggaaaaaccggcggaacgcctcattcctctcattgaacttctcatcaacgcgggagcggatcccaaccagccggacgtggatggcctgactccgctgatggcctgcaactctccggaaatagccgtttgcctcatgaatcacggcgccaatccctctctccgcaacgatgacggccagacagcctatgacttccatatgaaaaacgggtatccccccattgcggaagccatcaagcactggcagtccaagcagaaaaaaggggaagcccgctaaatagcggacgccatcgcaggctttgcagccctccttctcccactggtgcgggaaagaaaagcggataccgtcacggcccgggaacaggcggccggaaccctctccccggaacagccgtgcttccgaagccatgcaggcagcccaccctgtttcctgttataaaaaagccgcttccccaattcaggggaagcggccttgaaaaccacaggaagaaagaattattcctctgcttctatgccttcgccgatcatcttgggatcttccggcatcttgcctgttgtgaagtaaccttcaatttcctccagggaacgtcccttggtttcaggcaggaagaaggtcaccgtaatgaaatacagcaccgtaatgccgcccagcgtaaagaacacgccggaataaccgcagctgcccacccatgggaggaaggaaccggcgataaccgtggaaaccagctggttgatcaacagagcaatcgccataccgttggagcggatgcgggctggcatcagctcggacagtgccagccagacgcatacgccggggccggtggcataaaaagcaatgaagataatgaagaacgcagtcacgccccaacccatggaggtatccggcttttcgcccaattccgccttcagaatggaaacgggtttcatggcatagccgtccttgccgttcaccaccattttattggtggaatccggaacggccttgatcacggccagggaagccttgtcctcatccttcttgatatccttggtatccttggtcagttcagaaaactctacgacggaaagctgggtggaagaccccatcaggaactggtaccaggcgggattggcttccggctggtcataggtgatgatgagctgcatcctgttgatgtccttgtcggccatgccgttcttggcaagaagattcctgatgaagggggaatccggagtgcgttccaattgaagcgttcggatggaacccacatccttgccctgttcaaactccttctggacggaagggctctgggcggccagcagggcagccacatccgcagtcacatccttgcgggctttttccacattattgaacaggaacccggtgccaagaaggccgaccacgatgcaggccgttccgattttaagcaggaacttgcggcccttgcggtccaccagcaccatggcgacaatagtcatcaagcagttcacgaccttgatggtaaagtctgcccagttggcggtggtgccttccaggcctgcctgctggaataccttcacggaataattcagcacggaattaatgcccgtagcctgcgtaaacgccagaacgagcaccgccagaacaaagggatagatatacttgcgctgaagaagggactcgccggaagagctctgctttttgagttcctccgccttctgcttctcttcctcttcaatatggaccatttcatcaaacacttccttggcgcgggcatccccgtaactgcgcaccagcacagccatggcttcatccttgcggccgcggcggaacaggtagcggggagattcgctcaaacggaaggaaccgaaaaacaggaacaggccgggaatggcgcaaacccagaaaatagcctgccaggccagaaccttggcggaagtcagcgattcttcgctcgcgccggaattctcgacgccgcccacataactggcggcaagcaaaccgacgacggcggcaaacaccaggcccaccgtcagcaggaactggaacatccccgttcccttgccgcgggactcggcgctcaggcactcggccagatacagcggaacgaccacgcccacaataccggcactggcgccctgaagaatacggcccagcaacataatgccgaatacttcctgggacaggcagatcacggggatgctcgccgtgaataaggctgcggccacggtaatcaacgccttgcgtcccatcttgtcggccagatagcccgcaaacagggaagaaagaacgctgccgaacagcacggcggccaccacctgggaaagctgggagggattaaaaccggccgtctgctcaatgtagggaagcgcggcagcaatcacgccaacgtccacaccgtagagcaggccgcccaaaccggccatgatgaggagatagcgcatatatcgcctggccgcatccggaacggcggctttcatgttttcttggtctgtcatggtcgttgcattttagtaaattggctcttctccgcaaccaaaaaaagacgcttcccgagcaaaaacaaatttcctccccggaaatgcgttcaaatggtgaaaatatcgtaaaagaaacaagtaacaaactgtccgggaacaggaaatcatttggacacctctgcagaaatgccctcatgcatcccccggctccgaaaaacagccatgggaaaattccggagccgcacttcaattaccgtaacaatccccgtaaaccgtctggaaaaaactccccttccgtattgaagccagaaaaacagcgcgatgcgccatcacggaaacggaagccgcccttaccggcctcctttggcggaagaatctatcccaagccgcttttcaatcaggttcacagacaactccgcgcacaggcgcaattcgttatcggcgtcatgagtgaaagccttaagcgcggacagggaagcttccgaaccgatttccccaagaattcgggcggcggaacgtttcaacacaaaatcgtccgactcattcagcgaacggatgatatcagcttctcccgttgggcaagcagccttgcattcgtcctcccacttctggggatcctttttccattcctccagaagcaacgccaaacttctcttttccgaaccatgcagtaaaaacctgatcagagacgccgggatttcgcaatccgccttcttcagctccgtagccacgtaatcaaccacgcgctgagcctcctcatgatccggttctgcccataccacaagggccgaagccaacgcggtcacatattccgcatcacgcccccacggctcccggagaagctccaccagcctggaagaaacctcaccccgcatcttatccggatttacagccgacaaacgttttgcggcggcaataacgcggcggatgtccagacaggacagctccttcaaattggccagcacgaaatactggtggcgctcatcctgcaacgcggcggaagcgggccgcgcttcaaacctgtcccggttcagaatcacttccacaaaaaaacgctccttatcctgcagggtcaccttccccatcttgcccgcaacctctacaaattccttaaacgtaatgggagtgggagtaataacgaacagcccgccgcccgttcccttgcggtcataaaaaataggttcgtcctcggactgggtcatcctcttcaaatatgcctttaccatatcccggttggctgcattcaccccaaccacccatacgcccagaaccccctgggattccttgcggtcaatagcggaaaacagaggtttcaaatcaccggccccataattctggacagaagcgttcttggagggcagctgctccagccccatgctggtaaagccggagacatcttcttcctcggcgctcccctcttcatgccccccgagcagggagggattcaccttgaccggatacacgaaaggcagggaagcaatcccccctgcaaccagcaaacccagcaaaatgaaaacaatcttgtgcctgcgtccggcacaggccatcaagcctccggcaagacaggcaaaaaacagggcaaacgccttctgctggggctgctgcagcatggaaaggaaaaaggtcccatccatctcggaagaagcattgtaaaaaatccagacgcagtccgcggcaacagccagggacgcgcaaaggcacaccaattggatcagccccgtttccaccagagcgctctgaatggcttccctcctgtctttgggggaatggacggaaacggctttcttcgctttggcaaaaggtttcttaggaatcagtttttccctgtcgcaaagaaactcatgcccgcatttgctgcaattcaccatagagccctccgcggaagaaggcacattgatatgtcgtttgcactgtggacaattcagattcaccgggctccaatatgcacgtttttcattcttttgcaatacctgtcttcccaactttcctcttaccatgtaccccgcgaaaattggcaagaaacttccatcggctcctatttctatcatttccccttttcattccgactctctgattttttccgaatgttaaaactcgctcaaaccgctctcattgaaaataacatttaattgaaaaccattccgcaaacttcggaaaacaagggaaagggaaaattcccacctttccctggcggaaagctggatatttttcagtctcccttatcaggggctcaatttccaaacgcaccttgatataaattatttgaattttacaacacgggccattgaaaaaagataaaaacgctctccatgttcctcctcccgcctcacgtcattccgagtgaacacgcttgcagaagaggtaatttggtagtagaattttcgccatgtcattgcagcctgccgaacgccgagatttcatccgcgatatgatttctgatgaccttgcctccggcaagcatcaggccccggtaacacgctttcccccggaacccaatgggtatcttcatatcggacatgccaaatcaatctgcctcaacttcggcatcgcccaggaatttccgggtgcgcgctgccacctgcgttttgacgacaccaaccccagcaaggaagaccaggaatatgtggacagcattcaggaagacatccgctggctgggctttgactggggcgacaaccttttctttgccagcaacatgttcgacttcttttacgaatgcgccgtttccctcatccgcaagggattggcctacgtagacgaacagacggtggaggaaatacgcgcccagcgcggcaacgtgaacgtgcccggacaggaatcaccctaccgcaaccgctccgtggaagaaaacctggcacgcttccaggccatgaaaaacggggaaatcccggaaggcagagccatcctgcgggccaggatagacatggcctccagcaacatgaacatgcgggaccccgtgctgtaccgcatcatgttcgcggaacaccacaacacgggcagttcctggtgcatttaccccatgtatgacttcgcccacccgctggaagatgcctacgaacacatcacccattccctctgcacgctggaatttgaaaaccaccgccccctctatgactgggtcattgaaaactgccccgtcccggcacgcccgcgccagacggaattcgcccgcctgaaccttacctacaccgtcatgagcaagcgcaagctgctgcaactggtgcaggagggacacgtctccggctgggacgatccacggatgcccaccgtctccggcatgcgccgccggggctacactcctgccgccatccgcaacttctgccacaccataggcatcactaaattcaacggcttcacggatgtggccctgctggaatacagcgtaagggaagacctgaatgccaacgcgccgcgccgcatggccgtgctcaatcccctcaaggtcactatcaccaccctgccggaaaacgcggaagaaatggctgaagtgctgaacaatccggaaaaaccggaagagggcgtccgccgcctccccatcacaagggaagtctggattgaacgggacgacttcatgctggaccctcctaaaaaatacttccgtctggcccccggccgcaccgtacgcctccgggggggctactgcatcacctgcacggactacaagcaggatgcggagggaactatcacggaaatcttctgcgaacacattcccggcaccatcggctccaaccctccggaaggaatccagtgccgcgccgccattcactgggtaagcgccaaatacgcggtggacggagaaatccgcatctatgaccgcctttttacggaagaaaacccggacgctgctgaagaagggttcctgtccgtcatgaatccctcttcgctggccgttatcacaaacgccaagctggaaccctccctggccggagcggaaccagaattccgctgccagttcgaacgtctcggctactttgtggcggaccgcagggaccatgtaccgggccgtcgtcctgttttcaaccgcacggtggctctcaaggactcctgggcaaaaaaacaaaaataacctctcttcatccccttttatggacaatcaacttcaattctgcaccgttgaagaagccgtggaagaaatacggcagggacggatgatcatcgttacggacgaccctgggcgtgaaaatgaggcagacctgatcattgccgccgaattcgctacgccggaagccatcaacttcatggttacccacgccaggggcctcgtctgcgcacctctttcaccggaacgggcggacgccctccaactcccgctcatgacctccgtcaaccgggaaaacatgtccacagcattcaccgtctccgtggatgcggcccatgacatcactacgggcatcagcgccgcggaacgctccctcaccattcgcacgctggcagaccccaaagccaccgtcaacgactttgttcagccgggtcatacattccctctccgcgccgttcccggcggagtgttgcgccgcgcctaccatacggaagccaccattgacctcgtgcgcatggcaggccttcagcccgccggcgtttgctgtgaaatcatgaaggaagacggcaccatggcccgcatcggggatctggggggattccagaaaaaacatggcctgaaagcctgcaccgtagcccagcttattgaataccgccgggccaaggaaaagcaaatccggctggtggaaaccgtcaacatgcccacagactacggagactttacctgccgcctttatgaatcccagctggacggagctcttcatctggccctggttcacggggaaatctccccggacaagcccacgctggtgcgcgtgcatagcgaatgcctgacgggagacgtcttcggctcccgccgctgtgactgcggcagccagctgcacaccgccatgcgccgcatcgcccaagaaggaggcgtcctgctctacctgcggcaggagggccgcggcatcggactggcggcaaaactcaaggcctacaaacttcaggaacagggtctggataccgtggaagccaacctcaggctcggctatccggacgacctgcgcgactatggcatcggagcgcaaatcctgcatgacctgggagcaaaccagttgcgcctgcttaccaacaacccgcggaaaatcgtggggctggagggctttggcataaaaatcacggaacaggttcctctcatcatcccacccaacgaacaaaacagcaaatacctggctaccaaaaaatgcaagctgggccacatcctgtaacattccactccatcccttcatgtccacggaacttccccgccgccagcgcgccacgggcacgcgcgccaaaatctgcatcgtcgcctcggaatacaacgaacaatacacccaggccctggtagaaaactgctcggaagaactgaaaaccgtgcttccctcggtccgcctggaaatcatccgcgtgccgggagcctttgaaattccggtggccattaaatccgttctctcccgctctccggaaaaacgtcctgatgccgtggtggctctgggggtcatcctgcgcggcagcacagaccacgcggaccttatcggctccaccattacccaggccctgatgcagctcgccctggaattcaccacccccgtcattcatgaagttctgctgctgaatgatgaaaagcaggccttcgcccgctgtatcgcctctcagctcaaccgcggccgtgaagcggcccgcaccgctgcccgcatggcggaactcttcctcaactccctgctccggcaataatacctattactctctcctctctatcgccatgctctcacgcaaccaaatcagacaagccgccctccaatacctttacgccgcctctcagacgccggaaacggaacgggagggaatctgggacatcctgatggaacctttccggggcgactactgcaaactcaaggccaaggccgtctccggccatcttacacgggactatccggacaagctgcgcctcttcatcacccgtgcgcgggaaacggcggacaaacttcagcaagacccccttaccctgcccgtccgtgaccagcttcaggacctgctggccaaggaaggagaattcaacgcctccctgctccggctgaaaaaagccctgcacgaagatccctccaatgacaaggggtctctttccgccgcctgcgacgccgctcagggactcaataccgcactgatgcagatgcgccgccgcctgctggacacgctcaaggacttccccgcctataacgcaatctggccctccctcatttcctcctgcagcaaactccaggaaatcaatgaccgcatcaactgcctcattcacccggacgaccgcccctccctggcggaaataaaaaaagtggtggaggcaggaagggatgcggaggacctctaccgggaagccaaaaccctgggagaagacatcctgcgccgccgggacgggctggacgccgccatcgactccaccctggaaaactactcccctgaacgtgtcagcgccattgaccgcgccattctgcgcctgggggcctatgaactcctccatcgcaaagacctcccagcccccatcgtcatctcggaggccatccgcctgtcggaacgcttctcctctgcggaatccccccgcttcatcaacggcgtcctggccggaatctcaaaaacgggacgcccggcataactccgcttcgcaccatggcaggattctttaaaaaactattcaccaaattttcccgaagctcccggatagactgggaagaactggaagctgagctggtagccgcggacatcggcatcaggcgcgctatgggtattgcggaccagttgaaggaaagcaaaggcctggatgcggaaaatctggtggaatccacccgtgaagtgcttcgccgggcctttccttccaccgctccgtccctgcccgcccctccggaaggcaaaccgctggtcattctggtcgtgggcgtcaacggcaccgggaaaaccacttctgcggccaaattggcccatttgctgcaaaaacagggctcccgcgtcctcctcgctgcggcggacacttttcgagcggccgctgtggaacagcttcaaagctgggcggacaagctgaacatccccatctgcaagggagcccccagccaggatccggcctccgtctgctatgaggcccatacgcaggccatcagggaaggcttccaatacctcatttgcgataccgcggggcgcctccatacgcgccacaacctcatggaggaactctccaaaattcgccggactctcgccaagcaggatgcatccgccccccacagcaccctgctggtggtggatgccaccacaggcgctaacgccctggcacaagccagggaatttcataaagcgacacccttggactccgtcattatcaccaaaatggacggttccggaaagggaggcgtggccgtagccatcatggatgaaatgcacatttccccctcctttctgggaaccggggaaggagccgaagactttgaacccttcaaccgggaccgctacgtggattccctgctgtaacgggaccgcctcaaatccatgccaccgcttcccctcatcactgcccagacggaggaaaagctgctcgccttcctgacggaacacgggcacactaaattccgcacccagcaggttctggactgggtgtggcgcaaacgcgtcaccacctttgacgcgatgagcaacctccctcccgcgctcaaaaatctgctggcggaaaatttccgtttccacacgccggaaatcgtggaaatccacggttctgcggacaccacacgaaaattcctcaccaaaatggaagacggcagtctggtagaatccgtcatcatccctgccgcagcagcggaaaatggagaaaaatcggagcgcgtcaccctttgcgtttcttcccaggtaggctgcgccttcggctgcaaattctgcgcttccgggctgctgggccttaaacgccacctcaccacgggggaaatcatcgggcagattctctctgcggaagccattgcgggaaaacgggtcaacaacatcgtcttcatgggcatgggggaacccctctccaattttgacaacctggcggatgccctggaaatcatcacttcccaccgcggtctggaaataggggcgcgccacatcaccatctccacgtcgggattcgttcccggcctgaaaaaactggcggcctatcccaggcaaatccgtctggccgtttccctgcacggagctacggacgaagtccgcgaccaaatcatgccggtcaacaaaaaatggccgctctcccagctcattccggcccttgaggaatggaacaggggaagaaaccagatgcccacgctggaatacattctcatcagggacatcaacgattctccaaaagacgcgtcccatctcgtccggatcgccaaacgcctgcacgccaaagtcaatctcatcccgtacaacaccgtggaggggctcccgtggaaacgcccttcggaagaacgctgccgttccttccgggatgcagttcacaaggcgcgcatccccgttaccatgcggtatgaaaaaggccatgacatcaacgccgcctgcggccagttgaggctgaggaaggaacaggaaaagagcggaaagacgtcccgttgacggaacggggcttttccgaatttacaacgttgcctattgcccggcgccctccgttgtgctatcctttccggccggatgccacccatccagcagcctcaccatggaaactacgacaaccaccactgccgttcccccgctggaactgaccagggcaccccgcaaaaccccgtccctggacctcagagacattccgcaagctcccggcccggaaaaaggagtgctggccctcatggccatggacccggccacttacgtggggcagtgcgtgaccatcggcatgacggaggactacttctacctccccgcgcacaagctgctctggcgccttttccaggcccgctataacaaaaacgaacccattgacatcgtttccatcacccaggctttggaagacatgcaccagctggaagccgtgggcggaagcgcgggcctggcagaaatatacacctttaccactaccggagcctattttgagcattacctcaatgtcctgaaggacaaattcatccttcgctccatcattgacatagccaaccagtccaccacgcaggcctttgacaatccggacgacgtagcggaactgctggattctgtggaaacccatattttccagatacgggaacgctataacagcgccaaggatgaacaaagcctggccagcatccttaaacaagccgtcaccaattttgaaaaattcatcgcaagcaaaggccaaatccagggactgaccacgggatttgaggaactggacaaaaaaagcaacgggcttaaaccgggggacatgttcatcatcgccgcccgcccctccatgggtaaaacctcctttctgctcaacatcattgagcacatcgcgcttaacgaaaaaaagcctactctgctcttttcctgtgaaatgcccgcagtccaaattgtggaacgccttctttttgcccgctccggagtccgcagccgggaaatcatcaagagaggcaacctcacccagcttgaaatgaagcatttcaagcaagcggtcaaggaagtgggagcttcccagcttgtcattgacgataccgcagccatctccatcaacgaactccgggccaaagcgcgccgtgtcatgagggatcagggaggtctggccgccattggtgtggactatctccagctcatgcgctcccactccaaacaggcggccaacagtcgtgaacgggaagtggcggaaatatccgccggcctgaaagccctggccaaggaactcaaagtgcccgtcatcgttctggcccagctcaaccgcggcccggaaagccgcacgggagccagcctgggcgtcccccgcatctccgaccttcgtgaatccggctccatcgaacaggacgcagacatgatcggcctgctctaccgctccgcctactatgcggaagatgaggaaaaacgccagcaaatggccggacgggccaatctgcatctggccaaaaaccgcaacggccccacgggggacgttccgctccactttgaagcggaactcatgcgcttctccacacgtgaggcagatgaacacgaccaggaaagcgaataaaacctctcgctgtctgtgcctgttctctgcggattaacaatccggggtcaagatttgattctaagagaaaataacttgcgtagactttcctttcgtatcagaggacgttttcatgaaatcaagcccgactggcatcatcggtttccaatgaaaactcaacaggcctttgcggtatttaaatttgcaataaaattttgagaattcccttttctggaaatagttacatgtagaaagaacgtatcatttcaatgaccgtagaaacttgtaacttttcccgaatcaaacagaattttcttcggtttcagcctgtaacggattgttaaaccggtagcatcgcggcaacgtcagcatttcttctggccttattgatcaaattatttctgtttttaatatgaaaaaaaacttatttattgctgcaatcctctgcggatcatgcatctccgctaatgccgccagcatggtcacggaatggaccggcaatgccggccctacggaaggcaacacctatgaactgggcaatgcagacaactggagcaacggtgtacccgcccgcggcaacaaccagggaccggatgtaatttttaataacaccggaaccatcaccctcagcggctccatggtggacacatccgatggcggcagcattactgtcacaggcaacagcaatgttacggtggggggaacccgctggacgggaaatgtcaccattggagcaggttccgctctctccctctcacaagtggactttaaaagcagtgacatcatcctggacggcaccttcaaccttggtgtctgcgggattgattccggcggcaacggcgcccgccttgtcttcggcattggaggcatcatgaacgtcaaccaaaaaatatggggggcttcggacttctccgtttccggtacgctggccaccacatccacggatctggctgctggagaattccagtttgttacccgcacgctgattacctccgccggctttgacggcggttccatttccctgggagacttcaccgctgaagacggcggagcactgaccaaggcatccggaatcatggaagggaacgccgcagactaccagggccagtactatctctacacggaagacgggaatgtcaaagtgcagtacgttgtggcgggagccgtgccggaacctgctacggccaccctcagcctgctggggctggcttccctgatgctgcgccgcaggcgcgcctgaccttttctccggtccttttcctcaacagcctgtatgcccacgcgtacaggctgttttgttttccagacgagtgacgaaaacgtcacggaaaacatcttcatgccattgccgggaatccgtagcattttttattatcttccgttcgacgtcatgcaagcccacgcaaaatcactcaacgaacgtttccgcaccctcatctccctgattttcggtctggctatcggctgttccctgctcttcggggaatcccgctgggaaacgtctcctctcattgaagaaagcctcatgctcctggcctgcttcatggccggcataggcgccttcgggcgcatctggtgctccctctacattgcaggttataaaaacaacgtcctggttactgacgggccatactccatgtgccgcaacccgctctatttcttcagcttcgttggcggcataggcgtatcctgcgctacggagaccttcaccatccccctgcttacggcgctggcgttcggaatctactacccgtccgtcatcagaaaggaacaggaaaggctcctcacccttttcggagacgcctaccggaactattgcaggaacgttccctccttcattccctccctctcacggctcaaaccgccgcctaccgcctactccgtcaatcccgccacgttcacgcacaacattgtggatgcgctgtggttcatctggttcatcggcatctttgaattcatcagcgggcttcatgaagccggaatgcttcccgtatggttcctcattccgtaacaggctcttttctcctggcatccagaagccccgcaagcgcccgttgggaaaccattttacggaaagatgagcgatcccgcggataaagcatcatctccgcccgcgtctcccccccccggaaagcccaggcaagccatacggtccccacaggcttttccggcgtaccgcctccgggccccgcaataccgctgacggcaacagcaacatcggctccggagcgttccagagctccttccgccatcgctttaaccacgggctcactgacagctccgtaacgcttcagaacattctccggaacgcccagcatctccgtctttgcccggtcggcataagtaacccatccgaattcaaaaaccccggaggcccccggaacatccgtaatcctcttggcaatcaggccgccggtgcagctctccgccgtcgccgccttcagaccctgctgcgccagatggcacacaaccgctttctccagggatgccccggcaggagcgagcacatacgccccggccagaatgcgcaaacgggcttctccctgtttcagggccacctcactgcccaccaggcgcacgtccacttccccgacgcgcgcgcaatacgctacctccaggccctccacctggtgcagggaatcatccaccagctcctggagatcgctctcccctatccctaccaggcggaacacgcgcaaatgaggaatatcctcatccgccaaatcttccagaagcggcatcacggaatgttccaccatcggcttcaactccgctggcggccccggcagcaggatgaacatgggaagggaaccgctggcaggcatcaccagtccgggcgccgtcccattggaattctccagcaccgcggcgccatccggaaccatggcctgcttgaaattacactccgcaatgggaatccccctccgttcaaaataactcttcagccactcagccacacgctcgtcacggtgcatgtccacgccgcacacgtcgcacagggcttcccgggtcacatcatcgctcgtcggccccagtcccccgcttacaatcacgatatctgcgcgccgggcgctctccctcatggcctcgttaatagcgtaaccgtcgggcacgacggttaccctccccacacggaacccggcctcaaataatctgttgcccagccatgcggcatttgtattcacaatactccccagcaaaatttccgtcccggtgttgatcaattcaaccctgatctgtttcatgcagccagtatgctctctcaagcaccccgtgacatgcaacaatcctgccatgtatcataaaaaacttcatttaaactccccgtaagatacattaggggtactgacaaagaccatgaacacaccttcccggccccgggccaccaaaatcatctgcactattggaccagcaacagacacttccgacatgctgggacagcttattgaagccggagccaacgtcttccggctcaatatgagccattccaaacacgactgggtccgggaagtcgtcttccgcatccgccggaaagcagcggagctggaagcgaacgtggccatcctatttgacctccagggtccctccatccgtacgggagacctggccgaaccctaccatttgaaaaagggagacacggtagaaatccgcctgggcacggccaagccggaacttcctttttccaccacggtaaactatgacggccttctgcaggatgttcaggcgggccataccatggtggtggataacggaggcatcctcatgcgcattgcggaagtacgcccggacaggctcatctgcgacgtgctcacggaaggcgtattcggctcccgccgccacatcaaccttcccggcgtagcgctgcggctcccggccctgacggaaaaggatctggcggacctggccgtggccgtagaatgcgaaacggactacgtagccatgtccttcgtccgggatgccgcccacattgcccagctccgggaacacatcgacaacttgggaggcaaggcccagatcgtcgcaaaaattgaagaccagcaggctgtccgccacattgacgatatcatcctggccgcagacgtcatcatggtcgcgcgcggggacctgggcattgaagtcagcattgaagaactgcccatcatccagcgccgcatcgtccgccattgccacaggctgggacgccgctgcatcgtagcaacgcatatgctggaatccatgataacccagcccacccctacccgtgcggaagtcacggatgtttccaacgccatctttgaacaagtggatgccgtcatgctttccggagaaacctccgtgggccattaccccgtacgctgtgtggaagtgctggattccatcgcccaccgcatggagtgctccggcaatctcaacttcgcggcatccgccatcctgaacggagaccgccagaaagccaccaaggcagccatctccctggcggactccgtggaaaacgcctgtctgatcgtctttacccgccgcggcctggccgccacgcaggcagccgtcctcaggccggaacgggctgccatcttcgccttcagcaatgaccctgtcgttgtcaggcaactcgccctggcgcgtgacgtaaccgcctttgaatctcccttcctgaaagacccggcccgcatgatttccaccgccctggacctgctgaaggaaaaagggctgatctcctccggccagcctgtcgtcatccagggggacagcctgcaaggggaactgctggcggattccattatcttcatgcgcgtggaataatggcctgcacctttcctatagagcgggagacggccgtgtggcccccgtccgcccccctcagggaactcctgctggatgcggatccagacgaacgccggatagcggatcacctgacccacggcgaactttacgtcgcaaaaaactgcgggactgccgccggagtcattgttatccgtcagacgggggaacatacatgggaaatcatgaattgctccgtagctcctgaatatagaaggcagcgttgcggaacagccctggtgcggcacgccctggacatcatcagaaacaaagggggccggtatgcggaagtgggaacgtccgatgcgtctccggggccaatggccctgtatgaaagctgcggattccaggtctatggcgttatcaacaaccacttcacggacaactatccggaacccgtctgggacaacggcgtgcaatgtattgacatgatccgcatgcgtgcggacctctcccttcggaaagaaggagcgcatcatactgctcagaaagcataaaccacgctgactcccgtcacccagctattgccctttaccagcgttcttccatacacgcggttcaccccgtgggaacccttgccgagccagtgcaggccaacaaaaggctctataaaaacattcccgaacagacggtaattcgccgtcaccctgaaatagagggactgccagccattgctgctggaaggccaataggaagaactcaacacggcaccgaatttaaaccccatataaaggttttccgtcatccggaaatccgatcccgtgcacatgtcaaaccaccagcccgtgattccgtaaaaggaataggcggcacttccctgcgcataaaaaccggggaggaatcccacatcatggcgcataatcagtgccgcttcatacgttgtccccccattgccgaacaaacgttcggaagcaaaccccgccaatccgccgtcattcgcacgaaaggataatgccgcatacgtagcttttccgaacttccgctgaagaccaagatccaccatcgtctcattctctatatcaaccgccggatgccccagaaagatctcctccttcagagccagaatcagggaataccggtcattcaaatcgcttctccaatccagccgcaaaggagccgtgggattacagcccgcgggaatcagccccctgaactcgtaattagtggaatacccggctttgatactgccgctgaccggtcttaaagcaggagcggaaggaacctccggaatgcgtgattccgccgaagaaacggccatgaaagcgacggaggccatgcccgctccaaggagaaaagaaaaaaagaaattcataacatcggaatgccgtacggaaagtattctggataaaaaaactcctcttggcaacaagcaaaaacgccgctgtttcctgctctgcttcaggaaacatcattcaggcctgcccgctgccaacttcagaaaaaataaacgagaccagccccggccactactccgaaattcttataaggcttgtcgcccctgtccgaacctcggttagccttcaaggcgccctctccggcccagttgaagctgacgaagggaacgagagacaggttcttggcacccagcttcaccggaagttcagccttcagccaccatgcctgggaaccgttggacataaaaagggatttattgtcaaaataagaggaagtggcagacatcccggcgctcaatacaaaatcggcgtcggagcagatagcagcctgataccccacatgcggccggaaccaccagccggtcataccctggaaggcatagctcatggttacgccggcaaaccagtttccgggcaaaccgtaatccagcgtcagataaaattcctgaatgacggaatgggtattccttctatacacatcttcatcactcatccaggtggcgttataatcatacctggcaaaattcccaagcaggccgccgtgaatcaggttccagccaagcgtcgtggacaggttcttcaataaaccgtcccggttcttccatccaaaaagaaaatcagtctcgttatgaaaagagaaatctctttcccctgccatgtggtgtcctgaaatcaggaacgtacaagatgccgccccaacaacggaattacaatcatccagcttataattcaaatccacactggcaggaataattccatctccttccgtcagtgaatgagaagccacaatgccgcggcaggtgtaattggaagcatacccggcatcaacttccccggacaaaggacagtcctgttccacgggaacagggagaaacagttttaacggaaattcccgcaaaagcggaagcggcaagaaaaacggccccccccgcaacaccaatgatatttctgaattgcatcatcacgcttcaaatgaaaatttggatatcggcgcattgcaaaaaacggagttcataaaaaacaatgcgccgccatcaattaaaaaaagcgcggcggatttctccgccgcacctgaaaatataattcaatcgcaggccggatggcttagaaagaatagacaaggctggctccagccactacgccgaagttcttgtaaggcttgtctcccttatccaggcccttattgaccttcaatgcgccacagccggcccagttgaagctgacgaagggaacaagggacagattcttcactcccagcttcaccggaagttcagctttcacccaccaggcctgagcgccattggcctgctcgaacgcagcgccaaaatagctggacgtggcagacatcccggccgtcacgacaatgtccgtgacggggcagagggcggccttgtagccaacataaggttggaaccaccagccggtcatgccctggaaggcatagctcgtggttacgccggcaaaccagttctgagtcagatcgtaattcagattcaggtaaaattcctgcgtgacggaatgagcatggtcatacttggcaaagctgcccagcaaaccgccgtgaatcaggttccagccaagcgtcgtggacaggttcttcagcaaaccgtccttattctgccagccaaggttgaaattggtctcattgtggaaggaagtatccctgtcccccatgagatggtggcctgaagtcaaggtcgtataagaagcggaagccacgatggagttggcatcgcacagcttgtaattcagattgacaccggcggggatgacgctatccccttccgccaacgcgtgggaagccacaatgccgcggcaggtgtaattggaagcgtagcaagcgtaaatatcgccggacagcgggctggaagtcgccacaggagcgggaaccggagtcggagcaacaatcttgacgggagtacccgcaagagcagctccggcaaaggatgccacaactgccgcaacactgatgatgttcttggtttgcatgactattacttggttagggtattaattgttgatttgctaacatggaaagaaaaatgctttttccccccttgttaagaaaagtgaaacattttcgtcacaaaagtaaagaattttctcttaataaatcagcaagtcattgatttcacattatttacatccaccaaccccatgacaaaaaatccaattctccatatcttgccaaaccttcccttccaaggcctggccggatacagacactccgcaccatccagaagcctgtcttctttcagggcaggagaaggattcaccagaaccctccgcctgcaggaaagcagcatgggcagatccgcggcactgtcgctgtaggcaacggcgttttccagaacaccatgttccggcagtacattccgctcccgcagacgctccaccttcaccgcccccttattattaccgttcggcagttccggcattgccggcatgcgttcctccagaagcacatccgttcccagaacttcgtcaaatcccagcagttcgcccaggggcttcacgtaaaatgatggagaagcggaaaccatgagacacaaacaacccttcttccgataccctgccagccgctccttcagctccggataaatccattcctgcgccatctcggcaaacttccgtccatattcccgcaccgtttcagcgggaagcccccacaaatacatgagataagccctcttcatccggttctcatcccatattctcaaaatatagagcggaatacaggccaggaaaagaaaaatcagcaagcgtctccaaggatggcgcctcaccacaaaacaggaaaaaatatattgcgtatcccagggaaggagcgtgccgtccatatcaaacagcgctgcgcctctttttttccaatcgtccgtcatgctttcatcctatacccgcttcccttaactctcaacacccaactcttccatgcccctcctcctgaatgcccaaaaccccggccgccgaaaggcaaccggggttttgaagcaaatccagaaggaaataagattaacgggagtaaaattccacgatgagctgctcgttgacgatgggagcaatctcttccttggaaggcacgcgggcaatcttgcccgtgagcttgtcacggtcgcattccagccagtcaggaaccacagtagcctgagtcaggtcaaggaaacgggtaaccagctgctgggaagaagccttgccgcctacggcaatgacgtcgcccggacggcaggagtaggacgcgatattcgtcttcttgccgttcacggtgatgtgaccgtgggaaacaagctgacgggcgccagcacgggtattgctgaagccgaggcggtacacaacattgtccagacgaagctcaaggagctgaagcagaatatcgccggtaatgccgcggcggcgggcggcttctgcataatacttgcggaactgaccttcaagcacaccgtactggaaacgcagtttctgtttttcagcaagcatcacgccatagtcggatttcttcttgcggaaggcgcgcatgccatgctggccgggagggaaggggcgcttttcaagagccttggtggaaccgaaaagggcaacgccaaaacggcgggacactttatcgcggggaccggtataacgagccatgatatattagatctatataggtaaaagattctcaattagacgcggcgggccttcggaggacggcagccgttgtgggggatgggggtcacgtccttgatggaggtgatttcaataccgatcgtctgcacggcacgtacggcggattcacgaccggaaccgggcccctttacgcgcacttccacttcacgcaagccgtgacccatggcctggcggcaggcgtcctggcacaccacctgcccggcataggccgtgctcttgcgggaacccttaaagcccatcttgcaggcggaggaccagccgatgacattgccgcgctggtcagtcacagttacgacggtgttattgaacgtggaggaaacgtgaaccacgcccgtggaaacgtttttgctgcccttggccttcaggattttgggcttgtcatcatcgccacccagaccaagttccgcaaagatatccttgcggggttcgggcttcttgatttcttcaggagcggaaacagcggcggccggagtttcagcgacgggagcggaagctgccgcttccacaggctgttcggcggtttcgttggtgatttcttcgctagccatagtaaagctatattaaaaattcaggttggcggattacttcttcttggcctgcgcgccaacggtcttcttcttgcctttacgggtacgggcattcgtgcgggtacgctgaccgcgtaccggaaggccgcggcggtggcgctgaccacgatagcagttgatggaggtcagacgcttgagaatggattgcttttcacgacgaaggtcaccttcaatcaaaatgccgtcggtggtgattacttgaacaatcttcgtgagctgttcgtcggtaagctgtcccgtgcggatgtcgggattgatgcctgcttgttccaggattctcttagaagtcgagcgaccaattccgtaaatatacggaagggaagcctcgatgcgcttctcgttgggtatttctgtaccgaaaaggcgtgccataatggattggatttgctagctgttatttttctctgcctcgcgcagagctattgcttggggcaagatggataccataaattgaggttttgacaagaccaaaacatcattttttctatttttaatctcttgcaccgcttgaagatgcatgccgcccgtggcggcggaggatgcgctccacagcccaggaagcgtgttcctccaccagaggagactccccgtaaagcgccttcagaaaatcaatgtcatccggagtccccgcattccccagcacaacgcagccgttacgcagcagcccttccctcttgagccttttcaacggggaattccggaacagggccgcaaaaccgccggcatccagggaaagaagaccacgcaggggaatggaagccagcagacgggacatgcggaaccgttcgtcaacgtccggcaaaggcttaccattccagggacagaccgtcacgcaggtatcgcacccgtacaggcgcgtgcctatcaggggacggatttcttccggaatagccccccggtgttcaatcgtccagtaggaaaggcagcgtccggcatcaacctgaccgttttccataattgcgcccgtcggacacagggccgcacaacggcggcaactgccgcatccgtttgaaaccggagcgtccggttccagttccagcgtagtcagcagggtagcgataaaaaagcgggagccccctttcctgcgcacgatcaaaccgcttttcccgcgccagcccaggccgcaggcctccgcatggtcccgttccataacagggccggagtccacataccccctctgcttcccgccgtaaatggaaagcagctcctgcaaatccgccagtttttcctccagaattccgtggtaatcctttccatgggcgtaaaggcaaatgctaccctccccttccgggcgcctaccggggctgtcataatcataggacaggcaaatgacggaacggcatccgggaagcacttccgcaggatccgtgcgccgctccggggaacgcgccatccactccatcccggcgtgccatccgcgctccagccattgaaacaatttttccgcatgcgggcttttttccgcacgggccacccggcagccggaaaaaccaagctgccgggacacggcgcacaaggaatctttaataacagaggaatccggagtcagcacgccggaatcatgaacaagagcatgcctcccaccaagaattttcttctgtccggtggaaattggattgcctgcaccccgccgccgcttcataatgccgcatatatgaacatccggattctgagcgatgggaaacagggccacctcaaccagtccctggggctggcgcaggctctgatctccaaagcggggggaaccgtggaaacggtagacctgcaggggctttcccttttggggaaaatccggaaggtcgtcacaggcagcgacattccacggccggatctgttcatttccgccggacatgcaacgcatatcccgctcatctgcgcgcggcaccatttcaaaacccgggccgtcctctgcatgaagcctacgcttccctgttcctttttcgacctctgccttattccccgccatgacctggattccggccgcgattacacggatacggatatcttccccacccagggagctctccaccccatgaggccggatccctccgtaccaaaggataccacactgattctcataggagggcccagcaaagattttgactgggatgacgaaagcatgctcaaccagctcgcgtccatcagcatccacacccccggacaccttgttctaaccacctcgcgccggacgccggacggctttgcggaaaaaatccggacggccgttccggaactaaccgtcgttcccgtggaggaaacccggccggggtgggtagcccggcatctggcgcacgcctccgccgcctgggtcagccaggacagcgtctccatggtatatgaggctcttggctccggcgcgcctgtaggcatcctttccgtaccgcgccgacacggcagccgcaaatcccgcatcctgtccggcctggagacactggaaaaggaaggcatggttactggatacagtgactggaaaaaacagaacttccgcctgacggctcccggttccccgcttctggaagcggaccgtgcagcagactacatcctctccagatttttccctcagctccgcgccttatgaaaatagtacatctcgtcccctccatggaatccggaggcgtggaacaagtcgttatggaactgggcagcggcctttcttcccggggcgtggaaaatatcgtcgtttccggaggcggacgcctggtgccccgtctggaaaaggaaggctcccgccacatcctgatgccgataggcaaaaaaagcatctccactctcttccgcatcggggccctccgcgccctgcttcaggccgtcaggccggatatcctgcatctccattcccgcgttcctgcgtgggcaggctacctggcatggaaaaagctcccgccggaagaccgccccggcctcgtcaccagcgttcacggcttctactccgtcaaccggtactccgccatcatgagccgaggagagcgggtgatcgccgtctccaactgcatcagggactacatccttgaccattatccgtccacccctccggaccatatcagaatcatacccaatgctatttccccggaccaatatcacccggcctactccccctcccgggaatggctcatgggctggttcatgtcctatcctgaactgaaggggaaattcaccctgtgcctgccgggccgcatcacgcgcctgaaagggcatctggatctgattccggtcgtcaggcagcttctggaacagggaatcccggcccacgccgtcattgtaggagaagcaaagaagggaaaagaagaatataaaaacgaggtcctgcgggcaatagaacgttccggcgtctcccagtccttcacctggacaggacatcgccaggatctgagagaaatcctttccacatgttccgtcaccctctccctgaccaaaagcccggaagccttcggcaaatcaaccctggaggcgctcgccctgggcaaacctgtggccggatacgcccacggcggagtcaaggaacagctggacgccttccttcctgaagggaacgtcgccgtaggagataccgccgccatggcggacctgctggcccgctggcatacccagcccccccccctgccccggcaaattccttccccttacaatatgcaggatatgattcaagcccatctggacgtttaccaggaactgaccccttattcatgacaccccgggaagcagccatagccctgaacctgataccgggcctgggccctgtcagaatcatgcgtctcctgcaggtattcgcctctccggaactgattctggaatccccttcctccctgttgatggaaattcccggcgtgggggcgcagctggcttgccgcatttcctcttggcggagcatcgtcaacccgtacagggaactggaactggcggataacgcgggggccgcggtaaccacggtttttgacgactcctacccatcctccctgcgtgctctcccagacccgcccattgtcctctactcctggggaaactggaccggaacggatgccgaacgctccattgccgtcgtcggctcacggatggccacccattacggcaggctctgcgccagaaacatctcccatgacctggcggaagccggagtcaccgtcatttccggactggcgcgcggcgtggacacggaagcccataccggggccatggacgcggaggggcgcaccatcgccgttatcggggcaggactcaacaaactgtatcctcgggaaaacagaaacttggcgcagcgcattgcggacgggcatggagcggtagtatccgagttcccaatggacctgcccccctcccgcaccacttttcccatgcgcaaccgcatcgtgagcggctggagccgcgctacgctggtggtggaggcgtccggacgcagcggggccctgatcacggcccgaacggcggctgaacagggccgagacgttttctgcattcccggaccggttgaccggcattcttccgacggatgccatgccctcatccgggacggagccatcctggctaccggagcctccgatattctgcaggacatgaactgggccgttccggaacagggactgcctctcttctcgccatgtcccccttccggagcctcaaccccaccgcttcccactttggaagaaaaggagattctccacgccatcagactgggtttcaatactattgacaccctctgcacctctctgggaaaagcggcgcataccatcaccccgcttttggccaaaatgcaaattgcagggcaaattactccggacgccggagggtatttctccattaacagcagggaactttaggaagattccgcttttccgccggggaaaacgccaggtccgggcctcctctccctgaccatggaaccggaagggagcgccgtccatctcccgtataaaaacctttccatccggacacaaaaaaacgtcttaaaacagtcgccaaatcctttccttcaataattttattccaaaaattaaatatatcggcaggacatccccggcattttaaatgcctgcggcaaatttacatgcccgcgaaaaacaaaatatgttcgaaaaaaatctctgccatatttactggacgcaggctcgggcgcatacggcaacacctcttaaaaagaactgttgacgaacatattttgaacgcatccctcctgcctggagtctcatccttcacaagatctgtccgacggatggaaaaagcaatttaaaatccgttcagggtggtttttggttccataggtagttaatagagaaaaaaggccgcggattgtccgatccgcggcctttttcgtccggctctctttcaaatgcggagtttgggcttgatgaacgaaacttcttactgtagcaacaagacatgcgtttattcgcccttcttgcaggattctccctttgcctgagctccacaagctgccaatcgtacggggattcaagtgattacatccccctcgcaacgcccgttcccccacaactctcccagccggtttcccatgccctcccccgaccggccaatttccccacacgtcccgtagccatcccctcaagcgccccacgcacgccccgctgcgccagcgcctgcgtcatggacgcccttaccggcaaagtgctcttttcccacaacggcctccagcaccgccaggtagccagcacgcagaaactcgtgacggccatggtcgtgatggaacacggcagcctggacaaaaaagtggtcatccagccttccgataccaaggcggaccccaccaaactgggatgccgggcgggggaagtctattcacgccgcgaactgctcaatgccatgatgatccgcagtttcaacgacgtagccctggctctggcccgcgatacggcgggttccattccccgtttcgcccagttgatgaatgccaaagcccggcagatgggcatgtacaactcacgcttcgccaatcccaacggcctcccggcggatcaatattccactgccattgacatggcccgctgcgcctattacgtgtaccgcaacccggaactgcgcaatattatctgcaaacgccaatatgcctttacccgcgccaacggcagaacgcttctgctgagaaacaccaacaagctgctcacccagaacccctgggttaccggaatgaaaaccggatacacgaacgccgccgggcgctgcctggtttcctcagctagcgtcaacgggcgccatgtcatcgtcgtcgtcctcggctgccatccgtcccgtatctggacggaatcggaaaacctgatcagatgggctctgggatccgccggataaatgcccgtcggcaattggtatttgactttcacggcgtgacccgctatcagtcctgcctatgttacaggcaggtattgtaggtctccccaacgtcggcaaatccactttattcaatgcggtcacccggacgcgcaaggcccaggcggccaactatcccttctgcaccattgacccgaacgtgggtatggtaacagtcccggatccccgcctgcaggttctttccgacatgtccggttctgaaaaaatcatccccacgcttattgaattcgtggacattgccggtctggtcaagggagcctcggaaggagccggtctgggcaaccagtttctggcaaacatccgtgaagtggacgccatcgtgcaggtagtccgctgctttgacaatgatgatattatccatgaactcggttccgtggatcctctgcgcgacattgacatcatcaactcggaactcattctggcggatatcgccaccatggaaaagagactctcttcccgcgaacgcaaggcacgcagcggcgacaaggaagccaaggccgaagtggccctcatcaccaaactcctgccccacctgaacgaaggcaatcccgccctcacccttgaaccgcagctggacgacgatgaatgcaagctgctccattctttccagctgctttcggataaaaaaagcattttcgcctgcaatgtcaatgaagacgaactggcggacgccatctccaacccggacgcccatccctacgtctcccaggtgaaaaaatacgtagcggaacaccataacgcggaagccattgtcatctccgcccggattgaagaggaactcatcgacgtctcggaggaagaatcccgcgaattcctggaatccctgggtgtgaaggactccggcgtttccgaccttatccgtgccgtgtaccaccttctgggcctgcgcacctacctcaccacgggaatcaaggaaacgcgggcctggaccattccggccggggcaaaagcaccccaggcggccggcgtcatccacacggactttgaacgcggttttatcgccgcggaggtagtgcactacgacgatctggtttcctgcggcggcaaggccggagcgagggaacacggcaagctgcgcatcgaaggaaaagaatatgtcgtcaaagacggggacgtcatcgaattccgcttcaatgtatagacggaagcgttaccggaattccattgacttttactgatataaggggcagattgctcataaccttcacatcgcctcatgactgatacagacgtcaaatccacccccctggcagctaaacacgttgaactgggagccagaatggttcctttcgctagctggaatatgccggtgcagtacaccggcattctggacgaacacaaagcagtgcgcgaaacctgcggcatttttgacatctcccacatggggcagttcacggtagcaagcggttccgctgcggcatggctgaactccatgctgaccaatgacatcaacaaactgaatgtagggcaggggcaatactccgtcatgctcaatgacagggccggagtcattgacgacctcatcctgtaccggatggaaccggaaaccttcttcgtagtggtgaacgcctccaagattgatgaagacttcgcatggctttccgcccatcaacctgcaggcgtaactctggaaaaccactccgacgaatacgtggggctggctgttcaaggtcccgaatgcggagaagtattctcccgcgtcatccccggcgtgaaacttcccccccgcaatggaatctcccgcatcacggcggaagggacggatctcattatctgccgcaccggctataccggggaagatggttttgaattcttctgcccggctaaggaaggcgtcaaatggtttgaagcctttcttggagcaggagccaaaccctgcggcctgggcgcccgcgacagcctgcgtctggaaatgtgctatcctctgaacggctccgacctctctccggacaaaacgcctctggaagccgggctcggattcttctgcgcgctggatacggacttcatcggttccgatattctccgggaacaaaaagccaacggcctcagccgtcggctggccgctattgaatacaccggcaagggagctcctccccgcgcccactatgccgtgcacgtccccggcggagaagccatcggagaacttaccagcggcgtgctctctccttcgctgatgaagggcattgccctggcctacctgcctgccgcctatgccaaggtcggcacggagctggaaattgacgtaaggggaaggaaattcccagccgtggtcgtaaaaaaacccttttataaaaaaggctgacactacggcgcaaaaataaactgacaaacacctcattttactacactctcacttcaaacaattacatcttatgcacgacgtaccagaaaatctgctgtattccaaagatcacgaatggattgaaattgacggggacatcggcaccatcggcatttccgaccatgcccaggccgaactctccgatgtcgtctttgtagaccttcccgaagtaggcgccaccgtcgcagtaagcgaccctgtcgctgtcgtggaatctgtcaaagccgccagcgacgtgtacacccccgtttcaggagaaatcctggaagtgaacgaagagctttccaatgatccgtccctcattaactccgacccctacggcgcaggctggctgtacaaaatccgcctggacgttcccacggaaacggaagatatgatgaacgccacggattacgaggaatactgctcctgaaccattcttccctcccccgccccggtgattccatcccggggcattttgtttggcccgttccgcggccgaacgctattaccagccagagataccacatgaatacccactcagattttgccagcaagcacatcggcccccagggggaagaacgccgggaaatgcttgacagcctcggctaccggacgcttgacgaactcattgcggacatcgtccccgcagatatccgcatgaaggccccgctggacctgcccgcagccaaatcggaaacggaagccctggaggaactccgttccattctgcggaaaaacaagctcctgaaaaccttcattggccagggctattacggcaccatcactccctccgtcatcctccgcaatgtactggagaaccccggctggtacacggcctacaccccttatcaaccggaaatcgcccagggacggctggaaatgctcatgaatttccagaccatggtctcttccctgacagggctgccggtagcgaacgcctccctgctggatgaaggcaccgcagcagcagaagccgtcaccatgtgccggaatgcgcgccccaaagcaaacaccttctttgtggcggacacctgccacccccagaccatcagcgtcatccgtacccgcgccgccttccagggcgttaacatcatcgtgggagattgctcctcctttgaccccgcatccatcggtgcggatctggccggagtgcttgtccaatatccggacacgctcggccgcatctgcgactacacggacttcttttcccgcgtgcatgccacgggcgcgctctgcgtcgtggcggcggatctcatggcccttaccgtcatccgggaacccggcgccttcggagccgatatctgcatcggcaacacgcagcgcttcggcatcccaatgggcttcggcggcccccatgccgcctacatgtcctgcacggacgctctcaaacgccgcatgcccggccgccttatcggcatgtccatagataccctgggccgcccggcctaccgcctggccctgcaaacgagggaacagcatattcgccgcgacaaggcgacctccaacatctgcaccgcccaggtgctcctggccgtgcttgccgccttttacgccgtataccacggccaggaaggcctcaaacgcatcggcacggaaatccacttgaaaaccaaaagcctgtacaaggcgctcacggaagccggcattgccattgaaaacaaaaacttctttgacaccctgctgctgtccgttcccggacaagcggacgccatggtgcaaaaagccctggaagccgggtataacatccgcagggtggatgccgaccacgcagccatctctctggatgaaaccgcaacctgtgcggatatagcggcactggcctccgcccttgcaggtgcggaaacatccgccacctgcgattgcgacgctcctgcctgggatcccgtccacacgcgccagacgcctttctgcacggaaaaggctttcaactcctaccattccgaaacggaaatgatgcgctacatccgccgcctggaatcccgggacctggctctaaatgaagccatgatccctctgggctcctgcacgatgaagctgaacgccgcctctgaaatgattcccatcacgtggccggaagccaactccctgcatccctttgttccggcggaccagtcggaaggcatccgggaaatgctctccgtcctgtccgaccgtctggcgaaaatcaccggctttgccgccgtctccctccagcccaacgcgggcgccgcaggggaatatgccgggctactggccatccgccgctaccagaagcacgccggagaaggccaccgcaatgtctgcctcattcccacctccgcccacggaacaaatcccgcctcctccgccatggccggcctcaaggtggtgcccgtcaaatgcgacgaaagaggaaacatcgacatggcagacctgaaatcccaggcggaagcccataaggacaatctctcctgcatcatggtcacgtacccctccacgcacggggtatatgaacagacaatcaaggaactctgcgacatcgtccatgccaatggcggccaggtgtacatggacggcgccaacatgaatgcccaggtaggtctgacttgccccggctgcattggcgcggacgtctgccacctgaacctgcataaaacctttgccatgccgcacggcggcggcggtcccggcatcgggcccatcggcgtagcggaacacctcgtacccttcctgcccgggcacctcacgctgggccatgaagaaggggccgtagcgtctgcggcgtggggaagcgcctccatagccgccatctgctggatgtacctctccatgatggggccggacggcctcagggaagccacggaaatggccatccttaacgccaactacattgccaagaaactcggacatctcttcccggttctctactccggcaacaaggggctggtggcgcatgaatgcattctggatccgcgccagctcactcatgacgccagcctcacggtggatgacattgccaaaaggctcatggactacggcttccacggccccaccatgtccttccccgttccgggcaccctgatggtggagccgacggaatcggaacccaaaaaagaactggaccgcttcattgaagccatggaacgcattcatgcggaaatcacggccattatcaacggtacggcagacaaggaagacaacgtcctgaaaaactcgccccataccgcagaaatggtctctgccgacgaatggcggcatccctactcccgcagtgaagcggcttatccggtctccggtctccttattcacaaattctggccgtatgtaggccgggtggataatgtgtacggagaccgcaatctggtctgcacctgcgacacggtggaggaattctccaaggccgtagagttataaaaatctcatccttcctttcaaaaaggctgttccattcatttggagcagcctttttcttatgttcaagaatcggatttccaatccgaaagagcaaacatatccagaaaacaattaagcccaaaagcaatatgggttgaaaaagaaaaaaggaacatttctcccaccccgcttttcctcccctttcattttgatgacccatttgtactcaaaatagagtgttgacttcggattggaaatccgttgagctacgtctcagatgagctttttctctgcccttactgttcctggccttcaacagcatctttctttttccagggaagattccgctatcctcaaagggtatggaattctcttcatgatctttcatcatgtcttcggcttatacgctctgcccgcaggtgtggatacggcatggattgctccccagcttaccaaagccgctcccatctttaaaatttgcgtgcccatttttatttttatcacggggtacgctatgggatggaaaacaaattcatccccaaccttcggctccctcattaaaacaggcttttcccattactttaaattctggaaaatttatttcttatgccttcttctggctattctggtttcctgggcattccccttgcccatcttgccatccgttgccgacatgggttggaaaaatggcctgcttgtcgtaacaggattgaggccctgttatcccgactggtggtacatggctcttttcgcggcagccaccatggccctttatccaatctgtgcgtggatcacgcatcacattgcgcctgtcccgtccatggcagctctgctgggagtgtcccttttacttcaaagtacggcccacattcccagcctgccgggaatcgcctattccttccctcctttcctgccctgcttcattctcggctacatgtgcgcctttctggcttcacgcctctctgctctttcaatttccaaaagcttgggagcaatcctgttgctggctcttgaaatactatctatccatctcttcagtttttcaaaagccaaaaccctgacggttatctttctcttcaccctctggtgtctgccttggataacccggaaactccgcctcacaccgctcttgacgctgctgggaacttattccgcacttatgtggctgaatcacagattcattttcggctaccacttcagctgggacctctatgggacccaaagcatcagcgtagtattcatcgtgacgctggtctcctcccttctgctggccatggccatgcaaaaactttttaaccggatgattccctcaaatccgcaaacgcagtcaaaaactttgtagcaactttacaaggtccggattccaacccctcttaattccaagggggatctccgtacttattttctccaatccggctttccccatgggataaataccacaacagcagccaccctatgaagggaacggccagaaaaaccaggaaaaagccgctcctcccgacatcatgcagacgccggaccatggtagccgccagcggaatagacagcacggcaagcaccacgtacagcagaggggaaaccagctcaacccacggaaccagggacgggaacaaaccgcattccgcaaaagaggggattcccgccacggccagccacgcaacccccactctggaaaaaacctcgtgcagctcccctttcccggcacggccctcaaaacggcaccatgccttgatgacgcgcatccagtacttcttcctgctccagccggagtcggcgcctccagactccgaaccggggtccggcagaacggagggctccccatcatcatccatgacagtcatggcggggataaaagaggccagaggcctccagtctccgccgggaaccttccggaccaaagtccggttggacaggcggccgaggttacgggcccgcagcaaaagcaccaggtcaaccgggcctttggaagaaccgtcaattgcctgatactcgtacagatcgctcatagggacgcttacctggattccttcccgtggctgaaggcggaggcgggaatctcctgcttgggcaaaccgggaccttcccacttcaaaaccagtttggaggcagtaccggagttccccacatagccaatgcggatgggatgaagtccggctttcaaataaacgggattcttccggtcacccagatcggaggagacctcggcccccggctcataagttttgtccgcgtcaatcaattccatgccgtgcagacggacaaaagccttgctgcccttattttcatccgtggtcagataaaacgtatatgctccgtcctctggaatcttcacatatcccgtcagctccacaccgcgcttgtccgaaccgttcattttcacggatggggaaggcgtcacgccatgggcggaagcaggcttcttccactggcggaaatccggtacccagggaaaatccccctcatacaaggcccatcgcaacccgggagaaacggttcccttcacatccacggcaggcaccagcgcagaatcaaacactgttttggaaggaagggaagcccggcgattggacaaagcggcggctttcatgcgggcctgaagttccggcttggaggatgcgagatctttgctttcctgcggatcattcaaagtatcaaaaatcatgaaatccttgtccgcatccttcacccccatgcgcaagcctttcaatccatccacaaaaacaatctgctgctggcctcgctgcgctcccttgtgttcgcccaggaaatccttatactccggcgttttgccggcgaaattatattcggcataaacaatgccgggcttctgctggtccgcatgaccggtcagcgtcggcagcagggaaacgccgtcactgcgggctggaaccggcaccccggcgacatccgccagcgtagccagccagtcatggaactgtccaggatgcaggctgatctgccctttgggaatgcgggcgggccagcgtaccagcgtaggcacgcgcatgcctccttcccagcaatcgcgcttaataccgtccatcatgccataactcttgaaaaactgcggattttgcgctccgtgccagtgcctggagtcggagccaccctcattgtgggggccattgtcggacgtgaaaacgatcatcgtattatcgtcaatcttcaaatctttcagcagacggatcaaatcagccacggcatcgtccacgcggcgaatcatggtggaatgacgtttggccacatcattcgggaaacgggaattgtccggatgaatataggtatccttattcttttccgccttggcgtcaaaagccgtattcacggattccgtgccttccttctttacccattgcaggcctcctttcaatccgccgccggaaggatagggaacccccggaaccaccagattgccgtggggcgccggaaaagccaggtacaggaaaaacggctttccggtcttgcgggcggacttgcgctggtccacaatccactgcttggcgcgggcggcaaataaatccgtggaataagccgtctggggcacctggtccttgatatttttccactcgggattggaagcgtaaccgttgtattcgaaaacgtcacgggattcggaaggatagtgaaaatgccctgccaaatggtccaggataccgtaaaaataattgaatccccgctgatgggggctggcggtcatgggcacatggctctggcctccgccgcctacaccccatttgccaatggcggcagtatcatacccggcatcacgcatcacggtacccagcgtatgggaatcttcaataggctggtcgaaacggttgtttctcaccacgcgggaattcccctggtgcacccccagcagcagggaggcgcgcgccggagcgcaaaccggagcggcggaataatgacggcgcagctgaatcccctcccgagccagagcggacagggcaggagtcttgaactcgttctttctctccaccgtccggccattcagcttctgctggctccagttggaatccagatcaccccagcccatgtcgtccaccagaatgaaaataacattgggttttgaagttttgacagaccgggcagaaagcttcgttgcctgcccggaagcacccatgcacggaaccagggaagtcagaagaacggatagtaaagataccagcttcatgattcaaagaaaatagactctaaaaaagacgttaaaataaagcgttatcttacatgaattttctcatccctcaagaaaattacgaggaaagggcacagaggattgaatcgccagtattatcggcaaaaaacatcagggaaccagccttcacagccggaacaactacaacccgccatactgcaccaatgagcggcttttctggctgaagccatgaatgggagaaaattcctcctgcattcccggcgccccggtcaccagccccgcccggccatgctttatcctgaataaaacggcagtccccccgccgggcagaaaatacagaaaccggcggaaacagcaatcatgaaccggaacgttccaaaatgtccgcgccaattccggaacagcgttaataaccctgtccggaatagcgaaggcatcagaaacgcttcttcctgtcgtccctgcgggaacgttcgccccagcgttcgccgcggtcactgcggaagcccccgcagtttcccctgaatccgctccggtcactgcggtcccgctctccgcggtaactgttgcggaatcctccattgcggcgggaagagcgcggagttccggaatattccggagcccccttgtcttcacggacattaacttcatagccgcagacggtagccgtcgccagggcctccagaagcaggggcgccacggaagcgtccacttctatcagggaatgcttggggaaaatccggatatcgcccacggctcccttttccatttccaccgtattgtaaaataacccggctatgtctttgggccgcaagccaatcatccggcctccattcataaacagcgtaaccgtatcccccttatgctgccaggaatcacccttctgcgggctctccacctcctccccggtctgcggcatacgccgcgccctgcgggcgggcttgtcttccggaatgggctgcacttcccggtgcgtacgttcccggagcaagtcaaacagggccgcagccatggcctccggcgcagcctccacttccttcaattcctccggcagcacggcatccggcttgagacgttccaggatatcatccaccagggactctgtccggagctggtccacctgaacggcagtcaacacaggttccggagtcaacttaacgccgatgaaacgttcaatgcggctcatcagggaaaaatcacggcgccccacaaaagtgatggccttccccttgcggcaagcgcgtgccgtgcggccgatgcggtgcacgtaatcctccggatcacgcggcaattcaaaattcaccacggcatccacatcgtccacatccaggccgcgggcggcaatatccgtcgccaccagaaggcgcaggctccccttgcggaaggaatccatcacgcgctccctcatcatctggggcatatccccatgaaggcgatccaccggataaccgcgggccgtcagaccgtccaccacgtcatccaccacctttttggtattggcgaacaccagccccattttaatctttccggtgtcaagcagcaggctgagtacctcaatccgggaggaaaacaccacttcgtaataaacctgttcaatggtaggcaccgtcagcgtaggccgttcaatggaaatctggacgggctccttcatgaacctgctcaccaggcggctgatttccggagacatggtagcggagaaaaacagggtctgcttcgcttccggcatagcgtccgcgatatgttcgatatcttccagaaaccccatatccagcatctcgtccgcttcatccagaatcaacatgcggagaccgtccagccttagcgccccggactccatcaggtccatgacgcgtccgggcgttcccaccacaaactgtaccccgcgcctcagggcgtccagttgcgggcggaaagaagagcctccgtaaatggggacggcggaaacaccgtccatgaacaaagccagcttgtccacctcccggcaaatctgaacggccagttcccgagtaggacagagggccagcacctgaacgcagcgttcctcaggatcaatgcactccagggccggaatggcaaaggcaagcgtcttcccggagcccgtatgggacaaccccacaatatcggcccctccgatcgcggcgggaatcgcctgctcctgaatggaggaaggagtatcgaagccgagcacttcgatagcctccagaatctccggtgaaataccaagagccgaaaaagaagatgtttgagtcatgggggaaaaatgatctgtcagagtcacgggagaagctgaacattattccctcccgtgtccagccaaaagaacggaagataccgtagatgccacgatttccgcaaagccgcctgcgaataaaaaaacggctctccccgcttctggtctttactgtcacacacggggttgcaacttgcaggggcgcattcgcatatggtacaaatatttccctccgaattcatggataaaacgccaaacaaatcacagtcctccctgctgggaattttcatcaacatcctcctcccggtactgattctggactactgcagcgcaggccccgccaatcccctggaacgtccggagggagaaagtttctggcatatcggcccggtatggtctctcgtcatcgccctttccctcccactcgtctatggcatccgttccctggccgtctccaggaaatttgacctgatgtccggcgtaggcatggccggcgtgctgctgacgggcgtcatcagcatcttcgtcatcgggccggaagggcgcatccacagcgccacaccctggctgttcgccggaaaagaagccctgatccccctcatcctggcggcagccgtcgtcgtctcccgctccaccggcacccccctcctcaacatgttcatctacacgccggagttattcgacgtgcgcaggatagaacaaacggtggccgccaacggcgaggaacaggcttaccagagcctgctggcaaactcgtcatggattctggcgggcacattggtcgcatcctccgtcggcaatttcttcctgagcctctctttcatgtcctccgtcatacgccagccggaagcggaacagcaagtggcctacaatgccgctatcggcagcatcacctggtggggcttcctgatcatcgggatccccattctggcagctcttgtcttcatcatgacccgcctgattaaacagctcggcaggctgaccgggctctcacggaacgaactccttctcaaataatcctcaaaccatgcgcctccatacttcatgcatcctggctgccgccatcgcccttaacgcagcgtgggcggacgccccccggttcgaccggattttcggttcccatatggtacttccccacgggaaaaacattcccgtttccggcacggccgcccccaacagggaaataaccgtcacttttggaaacactgcactgaaaacaaaaaccgattccaaaggaaaatggagcgtcacgctgcctcccatgcctccctgcggcacaggccagacgctggcggccgtgcaaaacggagactccgccaaattggaagatgtgctcgtgggagaagtgtggctggcttccggccaatccaacatgctgttccgcctgaaccagaccacgacggccaaagaagacatagcggcttccggagatgaccagctccgcctgctcaacaatattccgcaagcccacaccaacaacgccccctactccgggaaagattttgacgccgtcaccacggacaacttctataaagggcaatgggccgccagctcaccctccacttcaggccccatgactgccgtgggctactatttcgggaaaaaactccgcgaagggctgggcattccggtaggcattatccactcctccctggggggttcggaaatcgcagcgtggctcccccggcaggtcattaatgcaaacaacagtttccgcaccctgcgcggcaaccactggctggactccccccttatctccgactgggtaaggggacgggccagaaaaaatatctctccgcgtctgaatcagggatctccggaccatccctacaagtcggcgttcctttacgaatccggcattgcctggacaacaccactccccatcacaggcgtgatctggtatcagggcgaatccgatgcggaaattattgacaacgcccaaaacggcatgctgctgaaaaccatgatctcctcctggagaaaagctttccgcaacccggaaatgcccttcgtcatgatccagctcccccgcattaacgatccgtcaaaaatccgtgccggatggccggaattccgcgaaatgcaggacacagtggccaaaaccgtcccgcaggtttacagcgtcaacaccattgatcttggctccaccaatgccgacgttcatcctccgttcaagcgccctgttggggaacgtgcaggaaatactgccctgaacaaggtttacggtaaaaaggtcccctgtgaaggccctgccttcaaggccttcaagacctccggttccagcatcctggtccagatggaacaagctgccggactgaccaccacggacggcaagaaaccggcccagtttgaaattgccgggacggacggaatttaccatcccgccacggcggaaatcacaaacaggaaaggcggcacagccgttatccgcctctcctccccggaagtaaaatcccccaaaaacgcccggtattgctggaaccgtttcgtgatccccaacctggtcaacggcaaccagctccccgcccgccccttccggacggacgcacccgttctgaaaaaataactcttaccacgccatcattccatgaaccttcatcttttccttgcttccctggcagccacgctctcactgggcattgcggcacaagcttctcccgccaaagtggcctgcgtaggggacagcatcaccttcggctccggccttaaacccggagaagcccggtatccgcaagtgctcgccacgctaatgggcccggactttgacgtcagaggattcggcaatcccggaaaaacggcgggcgactatccgggccaagcaggacgctggtacggcagcaccagggaacacaagcaagccctggacttcaaggcggatatttatatttgcaaccttggcatcaacgacacaggccgatggtggaaccccgaactattctccaaaggctatgaagcgctgctccaggcatggaaaaacgccaatcccaaagcacggttctttgcctggggcctgctggggccggactaccgcggcccgctcaacaaaaaggcattccccggcaactgctatccggacgtacgcaaatatgcaggctcggacaacggctccgccgccaaccgcccggaagcggaaaaattgattgccgccgtagcgcgcaagtacaaagtcagtctctttgatgcgctgcacccgctctccgaccatccggaatggtatgttgacgggctgcatcctacggaacagggcgcacggcgtattgcggaaatcaccttcgccaagctggcaaaaagcctcaagattaagcagcccgtccccaggctggaaccgggtaccggcaacgtgatcatcaacaaccccggtaattccggcattcttctggacggatggaaattgacggacggctccaatacgctcatttttgaaaactccaccgtcatccatcccaaggacaggcttatcatcgccattggcccggaaacccaaaaagacccgaccgggcccctgcaaatcaaatccgccaaatcccccgcagctttccgcctcattcccgcaaaaaaatattaaaaaccactggaacagtttcattgggaacatgcagcagttccgtatgttcccaaatacccggcgcactctattcgcgcccttacgcaccgaggcaggcggcaagctgcggaactctgcgggacatccggattccccgcaaacggaatgcctgcgtccgggacagcttccccgctatcccggatgctccttttcatcctattttaattgagcatttctgcatccaaaacggtctaccgtgcatggaacagaataaaagcaaaccatccgcatgccgcctgcttggccccttggccaccaacaccagtatggatttcggcgttctgctgctgcgcctgggagtagcagtcatgatgcttgtgcatggcattcccaaactgggcatgctcatcagcggaaactggtcggccttccaggatcctctgggaatcggcaattttctgtccctgctgctgtgcgtaggtgcggaattcggttgctccatcctcattttgcttgggttcctgacccgcctggcctcccttatcctggttattaacatgtgtgtggcgctctttcttgtccttggcctctccggctggggagcacaggaactagcggccatctacctgctgatctatctaaccctcttctatacgggaccgggcaaattctccctggatgcctggtggctctggcacgactgcaagatagaagtggaatgaaaacagttcctcccgcgcgtcctatggcaaaaatacttcttttttcactcgccgcggaaggagccttcctctaggatgctggcacacccagtccatccgttcaatgtccggcaaactaacctacaagcaatcgggggtcgataccaaggaagcagccgcttttgtatccgacatcagctctcacgttaaaagaacgcaaaagcagagatctctgcaccaggcctttggccttttcgccgccgcctatgatttgagctcctacaaggaaccggtcatcgtcaccgggtgcgacggcgtaggcaccaagacggaaattctttttgaactggacatggtggaaaccgcaagcaaagacctggtggccatgaacgtcaacgacattcttactacgggcggcgaccctctccttttcctggattatctgggcatctccaatctggaacgggaacgctcccgtatcacccgcctggtggccggcatgtgcgactacctggaatcctgcaactgcatcctggcaagcggagaaacggcggaaatgcccggcgtggtgccggaatccatcgtggaactctccggcttctgcatcggctgctgtgaaaaaagcaaactgattgatccgaaaaccgtccagcccggagacgtattcatcggctacaaatccgacagcttccatgccaacggctggagcctcatccgccgcattctggaagaaaatccggatgtagttgatgaagaagaactccgttccctccttcagcccacccgtttgtatcatgacgtagtggaagatatgcgccgcttcaacgtcaccccgaaagcatacgcccacatcacggggggaggcctcccggaaaacctggaacgcttcctgggcgactacggcgcagacctctccattccctattgggacaacaccgccgcccagaaaatcctgaagcatgtggatcctcaggaccgcttcaacacttttaacatgggcattggctgggtagccatcgtgaggcctgaagacgcggaagccgcattgaaggcaggtccgggcggcacggtcatcggcacgctgagagaaggccgcggcattcatgtcaaggtacagggcgaataaaaaacaccatctccttgcagcggatacaccacacttacaggacaatcttttcatcatcatcccatgagcgattttcttaaacacgagtgcggcgtagccgccattcgtctgcttaagcctctctcttattttcaggataaatacggctccaccctctgggcgttcaacaaactgctcatcctgatggaaaagcagtacaaccgcggccaggacggcgcgggcataggctgcgtcaagctgaacatgcccttggggcagccttacctgttccgcacccgggacgccagcaaagacgccctcacgagcatcttcaacgggcaaatcaagaagctcaataaaaaagttcgccgcggccaggtcaatctgaaggatgcggcagatatcaaaaacaacttcgactacggcggggaaatcctgatggggcatctccgctacggcacctccggcctctttgacgaagggtcctgccacccctacctgcgccgcaccaactggccgacccgcaccctgatggttctgggcaacttcaacatgaccaatacgccggaattgaaccagcgcatgattgaacgcggccagcaccccgtcttcggaacggacacgcagactgtccttgaagaaatagggtatcacctggatgaagcccacacggatctctaccgcgccttgcgggacagcggcatgcccggcccggaaataccccatgccatttcctcccggctcaatattcaggaaatcatccataactccgccaagcaatgggacggcggatatgccatcatgggagccatcggcaacggagactacttctgcctgcgggatccgcacggcatccgcccatgccactacctgattacggatgaattcattgccgtggcctccgaacgcgttccgctgatgaccgtctttgaagtggaaagcgaacaggtccaagaacttccgccggccaacatgctctctatcaaggcagacggcacacatgccattacggaatttaccacacctctgaaaccggcgccctgctcctttgaaaaaatttacttctcccgcgggaacgatcctatcgtttaccgggaacgcaaggcgctcggcgcggcgttgactccccaaatcgtggattctctggaagaccgttttgacaaatccgctatcacctacattcccaacacggcggaaaccgcctactacggcctgctggaaggcctgcgcgtctaccgccgcaagcgcgtgcatgcccaacttctggaggccctgagaaacggcaccctggatgaaaacatgctggacagcgctatcctgaaacgctggccgcgcggtgaaaaaatcgcccacaaggatatcaaaatgcgcactttcatcacgcaggaaaaaagccgtgcgcaactggtctcccatgtatatgaccttacttacggcgccgtagggccggaagacgtgctcgtcgccattgacgactccattgtccgcggcaccaccctgagaagatccatccttcgcatcctaggccgaaccaatcctcggaaaatcgtcattgcatccactgccccgcaaatccggtatccagactgctacggcattgacatgtccgaactgggcaacttcatcgccttccaggcggccgtctccctgatcaagcagcacggtcaggcccgtctgctggaagaagtatacaaggcatgcagggaagaactggccaagcccaaggaagaacggcgcaattgcgtgaaggctatttacgaagggttgacggaggctgaaatctccagggaaatcacccgtctggtcactccgcatgacgctccgtgtcccgtggaagtcattttccagaccatcgaaaacctccatgaatccatagaaggcccctgcggcgactggtatttcaccggagattacccaactccgggcggatacaccacagttaatgtggcatacatgcgctggtttgagggtaaagggggccgtgcatacgatttgcccttgtagcggctccctttttttgggtattctgccgacaacatgtcgggacccatttcatacacgaccttggaagacaccgaactggtcgccagggcacgggaaggagattcgcgggcttttgacgaacttgtcattcgccacagccgcaaactccatgctaccctgtaccagatgacggacaactacgacgatgcctatgacatcgcccaggaagcgttctccaaagcctaccgggccttgcgctacttcaatggacaaagcgccttttacacatggctgcactccattgccgtcaaccacgccagaaacttcctgaaaaaacgcaaccgcagaatgacctacagtctggacgacgacgagtacggcgaccatacggaaaaggacatgaacatggcggatgaaacggacggggcggacccggaacgccgtacccatttgaatgaattgcagctcaaaatcaacgaagcattgaagaaactttccactaaacacagggaagtcgttgttcttcatgacgtaaaagggctcaaccatacggaaatatccgccctcctcggtatctctgaaggaacgctcagatcacgtctgcactatgcccacaaggaactccaggggctactggcggaatatctaagttaatcaggaaaaaaaatattgaacgtcaattcccgccgccatgtcaaacgcatagtcccaaattcgggactgacacattctaacttctattatacttaacatcaacgacgatggataaacaatccacagatcataaagaggaaactctggtggccatgctggcatctttccgcaaggaagcctgttaccatgacaccttcgaggaagatttcctccgcaattttcatctcagaaaggaaaccgatcaggctgcccactctgcttggaaattgctgctcgaacgcctggacaattatctgcagaactttcgtggttggcagtgggtctatgcttccatgtccatcgtgacattggctgcggtaggcgttattatcgcatccggaaacatggatgaaccttctgaatcttacgtatcctccaccaaggataaggaagaaatactcctgacgaaaaaagccgttcccgtaagtaaggaaactattgaacgaacctcaaccgaagttgctcccacggaaaaacctgaattcaccacgggagactcttcatatgaaacatcggccaaagacaaccagctgaaacctgattcccatgccgataaaaaaccggtatcccgcgttctcattgagatgtaacaatccatgatggacttggctccgatattgacgggcatagccgttgcaggcctgatttgccaggcaacggccgtgcctgtcccttttaaggtagaagccatcctcccccaggcggaaggggcgccgtatgcgaccatggcggcgcaaatcggtaaagacatgctggcctccctgattccctaccgggttttaaaaaacggaggcgtgacctaccacctcggggacaagagtaccccgccccttcaggtttgggcccaggaaaagctcacaggcctgacaatctttaaggtggatccagcccatatatacgacggacaggcagacctgacccctcccggcattcttaaacgcggcgacaagctgtcctttgccagcagcaaaaatgagaccacgcagggaatttacgtgggcatggaacattccatcggggacaccagtttccccctgcggctcatccgcgcccagttccccaagctggcagtcccccccatcggccaaccatgctacgactctgaaaaccgtctggtcggcattgttctgggcgtttcccgcaaaggaacctgccacctgctgcccgcccgtgccatctccttcctggcaacccatccggaagccaaaagagtgcgcctgggttgcctgctggacatcaactcctcaacccccgtcattgagggccttatcaacggaggtcctcttgcacggggaggaattcagaccggggacatcctcatcaacatcaacgacacgcccatccgcaactacggagacatgctggacgccacttattacctaacaggagacaaacctctgtctatcgaagtcatccgcggcacccaggtggtaacaagcaagggaatcctccccacgcaggatacccgttaatccaaatccgggctccaagtaaatgccggggccccggacggctcccgctcaaaatcgcccagaaccttctttcaggcttgaactcgcccgcaagcgcacttaaaaaagggcgtgcttcaaatcgtcttcaataaaatcagcgctgcggaagtatccagcatccccaccttggaacagctggatctgctcggagacttccaagtctcagaatccaccctccagaccctggatgacgcccgtttcggcaagatggaaaaggatggtaaaattctttatcgctacgtcgccaaagattaccgcatttactttgaagtcatcaaaggcaaagtgatcgtccaccgcgttctgcacgccaacagcctgaacgatttcctgtttcgcaccaatatttccccgactgccggggaagatgaaatcctgagccagtccaagcacttctggaaacttatcgacgaaggcaaaaacgcctccaaagcctgaccttttcccattcatggcctgcatcattctgggcgtcaccggctccattgccgcatacaaggcggcggatatcgcttccgccctggtcaaatacggtcatgaagtgcactgcgtctgcacagccaaggcccttgaattcgtcactcccctcaccctgcacacgatttcccgcaaccccgtcttttcctcctttgaggatgaaaagacggactgggttcccccacacatccaactggcccaacgggcggatcttctgcttgtagccccagccacggcaaacaccatggccaattttgcccatggcttcgctccggacatgctcagttccctctacctggcttgccagtctccggtgcttatttgcccagctatgaacgtccacatgtgggaacatgcggccacgcagcaaaacgcggccgttctgaagcaaaggaaggatcattacatcctcggccccagtgaatccggaattctggcctgcggagcggaaggcgcgggaaaactcatgccggtggacaggattattcaaaaaacactctcccttctgccgtaaggacggcaaaaatcgctccatgcctgtttattggtttgcccccggagaactaaatcttctatcatggacgcatatgaaaatgctcctgttcctcttcagttccctcatgctctgctcctgcggtccggataaatatcccatcagctttcatatggagacgggagcgacggacagcaaaaaattcgcctttgaaagggacggtcattactatagcaaggccccctttatttcccataaggacattgaatcctattattccttccctgcgccggacaacacctacggcatcgtcgtcaacgtccggaaaggcctgggcagccgggtggaaggaataaccgcctccaacctgggcaggcaaatactgcccatcgtcaacggccatgccatgcagcccctgcgcctttacagcaaacctgtcacctcaggaaaactggcagtcatgggagggttctccccggcggatcttgccgccatggcggaatttattcccccggcggatcccaagagagaagaacccatcaacaaactggccgccgttaccaagcctcttcttcccagcaaggaccctgctcaggaaaagaaggaggccaaagaccctgaagaacacaaagaccgtaccgtgatcagcacccgccgggggcggatctgagccagcacccctcgtatcagcatgcacggcaaatcctttcctctcctgaccggcatcctcctgtttctttggggcatgccattcctgatggcggatattgtagtgcgcttccccacggaaaatacagccctgctggacaaccgcccgcaggacttttacatgtatgtagaccgcaattttgaagggaagaaatcccagccgtgggaagctggagcctacggctttacccggaccctcgtcagaacccaggcaggccccgtagccgtcaaatttcatgagggtatcgacattaaacctctcaggagggatgcttccggcacgccgctggacgacgtgcaccccgtagccggaggcacggtagtccatgcctccgccaaccccacccatagcaattacggccgctatgtggtcattgagcaccagctgaaggacggcccgctttacagcctgtatgcccatctggcctccgtctcctgcaggaaaggcgaccgggtaggaaccggaaacgttattggaaagctgggatactccggggtgggtttgaacaaaacgcgtgctcatgtgcatctggaactctgcctcaagctacaagatgactttgaaaactggtattccagtctgaaactgggcactcccaaccgccacggttcctataacggactcaatttggccggctttgacccggcacccgtcctcctgcaatgcaaggacggggcgggattttccctctctcgtcatatctcctccctgccggtccaatacgtcgtgcgggctccctcttccggcgaactgcccagccttgtcaaacgctaccccttcctgctgaagccggggccctccgaccccaaatcctgggaaatcagtttcacgggagaaggggttcccgtttccgtgactccttccagccaaccgtgcacggaacccgtcgtcatccgggccgttccgcatcctttctcccaactgtacaggacctgcaaccgcgtttccggctccagcaaggaccctaagcttaccgccgccggcaaacgctacatccggctcatcttcatggggcctgaatcataatcctacgatgatgcaaaccttttccagattccgttttccccatgccgttctcacatcctgcgcggctgtcctgctttccctgggcggcgcttcccctgcagctgccgccccctctgcgggagacacctttccgcaggacaggcaggacctcctgaaaaacaaaaaataccagcagggactgaaagccctggaaaaccgccttcccctggaagccagcaaacacttccaggaatgcctgtcttcccaaaaccttgcggaatcacaaaaagccataatccgcccctttctggcagaagccctgatccgcgccaaaaaaacggaagaaggactgaatgcctgggagcagctgccggactctcccatgaaatcctactggacggcggtaggcctcttcaataaaggctcctttaccaaagccctggaaaaacttaccgctatcccggaaacggatccgctttccctctacgggcttcaattgaaagcccagcttgcgcgccagcttcaggaccggcagcttttactggaaaccctcagcaggctggggcaggcggaatcccccgccgtctcccgccccgcgcgccttcttctggcggatgtactggtgaatcaggaatgttaccagaacgccgccgccattcttgaacaactcaaaacggaagacgggacggacagcaaccggctcatacgttcatacgccgagctcatagaaggcaagctggccggcaaacagggaaatctggaccaggccatcaaaaccttctccgccgttatggacaacaaatcctatctggaaaaaatccgtgatctgggccgcctggctctcgccaaggcggaaatagatcgggaaaaaagcaatccagaacaggcggaagaggaaacgcggtccctgcctcaggaagaggaagctccgcacaccgccggaacggcggaggaacgcctgttggcgttcattggcggcaaagcggaatccgccttgctgatggacgccttcaacattctgctggaggaagacatctttcgaaccaatccccaggctctggaaaaactcaacggctgggtaaaagccagggatgcatcccgccagcaagcagccatgtatgccatgggaagccttcttctggaaaaagatgacctgtcaggcgccgtcaaaatggcggaagaggggctctccaaatatccccagagccttcccgttcaaattctttctctgaataccattactgttttgctggataaaaaccgtctgcaggatgcggaacgtcttatttccaaatatcccggttcatcccctgacctcgtctttcaacagggagccctggctttcctcaaaaaagactactccctggcgcagaaacttttccgggaagcggcccgccgcgcttcggaaacaacggcggaaaacgccctgttcaatgaaaacctggccgccctgaacgccaatgacgcctccggagctgccgctctcatcaaggaagcctcaggctcttcccggctccgggagagcatcctctttgaacaggcccattacgccgctaaaaggatggcccctcaggctgctgaattgctggcaaatttcataactctggcggaaactccggccctgaaaacccaggcgcggctggaccaggtggaagtagccctgaatctcaaccctccggacctggaaaccgtgcaggctatccttcccctgttggaaaaagagcagttgtctccggaacagaccatgcagctggcgcggctgaatattctggaggcggaaagcaagcaggaatggcccaacgccattcagtcctgccgacgagccattgccctggattcggaaggcaaacaggcggacatgctttacctcaaactgggagagcttctgtacaaaaacggagacttccatgaagcgcagcttgtcctccagcccttcccctccaaataccctgacagccctcttcaggcggcagccctctttctggcaggaaaagccgcccagcaaagcaataccggcagcacgctgaacgccgccctgaacatcttcaaaaccctaggcgcgggggacaccccctttgcccagcctgccagaatagaagaagcctccgttctgctgcgcatggggaaagcggaccaatgcatcgtcgccctggagaacctgctttcctccccattgccgcgctacatgcgcctgctggccctctccatccaggcggatgcatgggtagctaaggaagatacccattcggacactcttcgcaaggccatcaacctctgtacggaaatcctggacacgcccaacctgggactggcctggaaattcaaggctctgacccagcgggcccagttctatgaacgaatgaacgaacaaaaaaaagcgctggatgactatgcctccattctggcccatacgcccagcggaagttccgccaacaaacgcagggactggcactggttctacaacgccggcttcgcctccatccgcctgctgggccagcttcaggactgggacggagccctggcgctggcaaaaaaactggcgcagacttccggccccagagccagggaagcagcggcttacgcgcgccgcatccagctggaacatttcatttggcaggatgaatcggaagcctctgcgccggaaaacggaaagacggcgacaccggatcaaaccgcggattaagaagcctttcctcctgtcatggataccccccccacagcaaaaaactggagactcaacgcagcagccatcatcatggacgctgaaggctgcgtattgctgggcaaggacagcggccgcaacccgtactggcactttccgcagggaggcgtcattaaacacgaaagcattgaacagactcttgcgcgggaggtatgggaggaagtgggcctgcgccccacggaatacaccattgtcagccgcctgtccggcctgcgttacaaatacccttccggcaaccgtaaagttacgcgctggataggccaggaacaaacctactttcttgtgcgctgcaaaaccaggcgccctaaaacggatttgcaccgcagccccgaattttcaaaaacgaaatggattcccctccagaatctcaaactggaaatgttccccaaattcaaaaggaaagtcatcaaaaacgcccttcagcaattcttcgggcccggctttccttccaaacacgccgctgtgaaaacatcttccccctcctcaccctcatcttcaacactaacttcgcgtacgatgaaccgttacctggtgcctccgggcaaaaaactgcgtttaaaggattattctccggatgacaaatctctcttctccggaaccaaggaagaatccctgattgaattcgacaaactgagggaagaactgcaggaactgcaaaaaaaactttttgctcagcacaagcacaaaattctggttattcttcaggccatggatgcaggaggcaaggacggctgcgtcaagcatgtcttctcccgggtggatccgcaggggctgcacgtagtccccttcaaaaaacccactactgaggaactggaccacgatttcctgtggcgcgttcacaaggaggtccctgccaaagggcagatcgccatcttcaaccgttcccattacgaagatatcattgccgtccgcgtgaaaaaaatcttcccggacccagtctggaaacgccgctacaagcacgtcctcgactttgaagccatgcttgcggaagaaggcaccgtcatcatcaagctattcctgaatatctccaaggcggaacagaaaaaacggctggaatccagacttcaggacccggataaactttggaaattctgcatggatgacctggatgaccgaaatcgttgggatgaattccagacagcctaccaggatctcattgaaaaaacatctactccggaagctccctggtacattatcccggcagaccggaaatggtacagaaatctggttgtcgcccgcctgatggtagaaaaactgcgccatctccagctttcgctccccactcccaactttgatccagcctccatcatcattccagattgacaaaatctgtcataacgataactaatttgtgcatcataaaattatttttgtacatttctcggtattcagttgtcccattattacaaaatctgcattattcacaataacaatcaaaacttagaatttctaacgcttgactgttctagtgaaaaattgttagaaaacaacttaacacctagaacgtgtaaacattctacatagaaaaacaaaatcaaatgtatttagcatcccaacgcaaagagttcattctgaaaacgctggctgaacatggagctgcaaggaccattgctctggccaaacagatgaaggtcacggatgaaacggtccgcaatgatttgattaaccttgaaaaacgcggcttcctcaagcgcgtccacggcggcgctctggcgcttactcacaaatccctccatgaagacattgtcactcaagacgatgtgtctatcaggattgcaaaaaaaaccgttcagaatattcccgcttccgtggttatgttcattgacagcagcaccatgggctaccagatatgcaaccacatcaattccaaagatacgcatgtggtttccaacaaccccacgctgctgacccggcttgaaggcattccgaacctgagcttctattgcacgggcggacacttcgaccgcgaagccctggtctatgtagggcaggacgccgccaaggccgccgggtccctgagcattgacatggtcgtgctgacgccagactgctactcccccaagcatggcgccggatacaagaacatgttgcaatccgaattcatcaagagcgtcatccccgcggatgccaaggtaatcatcgccatgccctccaccagcgtagcgaacaacccggcattctataccgttgcgccctcccaggtttccatgctcatcactgatgaggccctttctccggaaatggccgaccagattgaaaagagcggcgtcaaggtggaactcgcctgacatcggcctgctttacagggggcggaagttcatcggaacttccgccttttttataacgatcatatcctctctcttttccattccatccggtactcccggcttcccgtcagctcatcttccctggagccgatttcttcaaaccctccgcgccgatagaatgcgcgggcgcggacattctcttcatagaccccaaccgtcagcattcccttgctgtgttccttcacccagtccagcaacgctgtacctatcccttcacactggcgttccggcgccacaaacagagcggccagttccccctcccccaccaggcaggcaaacccgacaacacggccaccgtccctgcacacccatgtacgcgccctgggcaggtacacctgcctcatatcttccaccaaaccgcaccagaaccccactcccgcaaaagagtgggcttgttcggacgctttcagccaaatattcaaaacctccgtttcatccctattctggtaatgttctatcttcatacatcaataacaggtatgcggcaacccttcctgtagtttatacaagctagcatggaggaggcatggaactcaagaaagaaagtcccgccttccggtaaaaatgaaaggaaaggccatgacggacagcttttttccaccctttccccctcaccacatcactgtcccccggatcatggaacacaaaaggccatctgaaagagctcccagcctttcctcccttcaactacggcctgtacacaagtaccgggccggtacgcgaagactggacacagcgcaccttccgaacagcggagcccaccagggctgcagcctgctccacctcttcctgcgtcgtcatgaaagacagggaaaaacgcagggaggaacgtaccgcctcatcagataatcccatggccgtcaacacgtgggaaggcatcggctgcagcgtatggcaggcagaccctgccgaacacagcagaccagcaggttccagcaacagcatcagcgcttccgccgtacatccgtcaaacgccagattggaagtattgggaatacgttccgttccgccggaatgcaccgtcatgccgcccacctgtgtccgcaggagagactcaaaagaatcccgcatccgggacagccgtccggcgtcctcctccaagtgcctcaatgccgcccgcgccgccgcaccaaaaccaatgattcccggaacattctccgtgccggacctcaagccgtactcctgccccccgccgaacaacaaaggggaaaaaggagcccccgctctcctgtacagacatccaatccccttggggccatgggatttgtgtgcggatacggaagcataatccacttccattccatgcaaatccacgggaatttttccggcgcactgcactatatccaaatgcacgggaactccatgcttcctggcggaggaacacaaaaccggcgcatcctgcaatgcgcctgtctcattattggcccaggcaaaagaaacgccggatacgccccctgcgcacatcgactcccatttttccggaatcgctctcccttccctgtccacggggcagacacagccgtagcccagggccagggccgtcttcaaggaggcgtcatggtccgtggacaaaacgcctatccccccctcctgtcccccggccatctggcggaaagccatattggacgcttccgttccgccggaagtaaacacaatttccgaaggaaatgcgcccaacagagcggcaacggccgcacgggcctcctccaccgcctcacgcacatgcctggcacagccgtaaccggcggacgggttgaaaaaccgttcctttaaaaacggctccatggcctcgtaaacctccggagccagcggtgtggtggcgttattatcccaataaatcacgccttcataactcccccaatcgcgggaaggagtcaagccggaacataatgcgcagctgcacaagatcactcttcacttttacccatgattccgcataatgcctctcatgcgttttcttatcacggcaggccccaccagggaagctattgaccccgtcagatacctcaccaaccactcctccgggaaaatggggtattgcctggcggaagcggctgttcacgaaggccacagcgtccttctcatctccggccccacttccctggacattccgcacggcgtggacttcctgccggttgaatgtgcacaggaaatgtataatgctgtcaaaaaccaggctccctacgccgacgccgccatcctcagcgccgccgtagcggattatcgccccgtctccgttccggaccgcaaaatcaagaaaacgggggaacgcatgattttggagctggaacgtactgcggacattttgggctccatgcgtgcggaattcggcttcagcggcattctggtaggctttgcggcggaaacccatgacgtggaaaattacgcgcgcggcaaactggaacgcaagcgatgcgatatgattgtggccaacgacgtttcccgcagtgacattggttttaactcctctgaaaatgaagtgctgctcgtttacccggaccggacggagtttctggaaaaagcgcctaaagcacaaattgcccttcaaatcattgagcgcgcttgccgtctcgcacagggaaaagctccgtcatggcgcacggcagacccgttccacgcttgaagcggcagggagtttgccccacgatccaatgccggcatgtaaatgcttaccacctttcccagaaccacattttcactcttcatgcccgtcactcttcaggatttaggctggaacaaccattttcaacgcgctttcgacgccgttgccaaaccaggctggatgccggggcgtctcatccgggaaacgaaaatcaacttcactgcccttctggacggcggggaagatgtggacgccgtcgtcagcggcaaactctggcatgatgcggccacggatgcggaactgcccgctgttggagactgggtggcgattgatccgggagaagcgggagacgaagccgtcatacgctccattctcccgcgccagacctgtttttcccgcaaagctccagggaaaagcagcgcggaacaggtattgggaaccaatgtggatatcgtggccgtagtgacggagccgggaacggacttcaaccccaggcgcatggagcgctactttacactcatccgccgcagcggagcatctcctctcatcctgcttaacaaaacggatcttttttccagggaggaagtggaaaacgccatgcagattctgcgggagctctcctcggaatgcgccataatcagcatcagcgccctgcacaacaggggaatcacggaattccgcaaatgcctctccaagggaaaaaccatctgcatcgtcggctcctcaggcgttgggaaatccaccctggtcaataccctgctgggggatgaatggctctggacgggagaagtcaatgaagtaaccggcaaagggcgccatacgacagtggcgcgggaactggtgctcctcaagcatggaggtttgctgattgacaatcccggcatacgggaaatccagatgtggactgatgaacataccctccgtgaaagctttgcggatttgacggagctggcccatgaatgcaaatttgcggattgcagccacggtaaagattccggctgcgccatcaggaaagccgtggacgaggggaagctggacaaggagcgatacttaaacttcctgaatttggaaaatgaaatcgcccggcttgccaaacgtcagaaaaaaaggcaaatgaacgtggaacgggccgggaaaagagaccggaaagtgcaggcccggaactatgaagaccgcgtggaactggaacgccgccacaagcccaaccaccgcagccatgactgattcgccgtcaaaattggcttgtcaaactgcaaaaacacacctaatggtgaagaatgctattttcacgcagcctcatccgaactttcctggctcttctggcattgggggcgcttcccttatctgcagaagaacagccgcttcctgctcaaggcggtcccgccgtgtccattactgacctgaagcccgtaaagctggagagggatgctcacagcaagcttcttgtagcgcaatgcactgtcaatggagtcccatgcaatcttattgtggatacggcggcttcccacaccacatttgatatcaaattcatcaaaaagaattttcccggcctgccgcttgaagacgttcaaatagcccctggttccaacgtccatgccgtcccccggctatttgccatgcggtccttctccatgggcgggcttcatatcaaaaacttcttcggccttgccctggatcttactcccctgcaaaaggacatgcaggtgaagatagacggcatcctgggcatcaactacctggggttctctccgttcctgctgtccgtcaggaatgcttccctgcagtttctggaacgctcccgcttcccccaacacaggaaaccgctggatgtggaacgtgatccttccggaattttttacatccgctgttcccgggggggagatactttcccgctggctcttgactccggctcttctctttccatggccccgctggaacagtggcccgcagatccgaacggcaatcagctcaccaccaaggcaaccgacattaacggacacaatggggactgcactgttatgaaactgggtatcccctccacgctccgcatgggaccggacttccaaatggacggcctttccttcgccgtaacgggaacagggggccgataccagatcggcgtggatactttccagcattttgacatcatcattgatgctccgcagggggaagtcttcgcccttcctccccattccaggccggagccccaggggcaaaaagcccccgatatcaaacaggaatcttgagcatgatgcagatcatgcgaatggtccgggccgtagcgccgaaatgggccttcaacgccacctgggcgcgggaagactgggcatgagccagcagggggttgtccagcatctccttgagcacgtctgccaggcggttttcatcacacctggcaattccgtccactccttcaagcagctggaccagtgcatcgaaattttccatatggggccccgtcagcacgggcacgccacaggcgacggcttcagccggattctgtccaccgtccgccaaaaagctttttccgatcacggctacatccgccagcgcggtccagtccctcaattcccccgtcgtatccgcgatgtaacaaacatgatccttcagggtttccggaatctcgccatcagtccgcagcacgcactgccagccctgggcctccagttcccgcaccacggcatggcggcgttccgcatgcctgggcacgatcagggggaagcctcccgccttgcgcgccgcttctgcgatcagaacttcctccccgtcatgcgtgctggcggccagcactacaggcttgccgcgtttcagtttgtccaaaatggaggcaaactccgcattagcctccctgcgctccgccatttgctggtcaaatttgatgcttcccgtcacgtggatgatggaggaacgcacgcccacggattcaaacctccggacatcccccttgtcctgtacgcccattgcgtcaaggaaggaaaaataatactttgaaatccatttaaatgcgcggtagcggctctcggacctggcggacatacgggcattaatcatcgccatgggtatgccgcgcaccttggctgcacgggcaaaattcggccacaactcggcctccaccaggacaatggcctccggttcaaaacggtcaaaacacctccccggcagccccagaaggtcaaagggggcataaatcacgcgcacgccgggaatctgcgcactcactgccgtagcatgccccgtagccgtactggtagccagcacggcggaacctccgcgttcccggagccacgcccggagaaacttgagagccagcaccacttcacccacgctcacggcatgcacatacaacacccctttcggctcccggttataggagacccggtacagcccgaaacgctccagaagccccgtgccgaatccgcctctcctcttctgcttaagcagataggaaggcagcgttaccagccacccgacggtatacaggatattgtaacagaaggaaaacaggaaggctttcatcttacttctcaggcaattggtagaacagcagcatatttttcccgtaccggcgggtatccaccagattcaggccgtcaatttccgcggcgccttcccttccggtaccccagccctcctgcacttccgcaataaacacgccaccgcccttcaaaagtccggcaactccggcctccgccagttcaacaataaagtcgcggtccgccggccccttgcaataaggaggatctgcaaaaataatatcgtacttcctgccgaccagcagttcccttctcacgaactggacggcatctccctggatgacagttccgccttccaagcccgtcttgacgagattggccctggccgccgcgcaggagagacgggaaaaatccaccatgcgggcgtctctcgccccacggctgagggcctccaggccgaaggcgccggacccggcaaataaatccagcacgtcggcccggtccatcagcgggttcaggatggaaaaaacggcttccctgacccggtctgtcgtgggacggacttcccccttgggaacagacagggttatgccgcaagcctttccgctgatgatacgcattgttgtcttaccggaaatgaaaggaacatcatatccctactggcgagccttggccttagccttttccagcaaagggtcacccgcgatgcgggtgacgggaacacgcagaacgatggactggttggcaatggcaacgttgtccgggttcttttcagacatgttgtaaacgaaataggcatacttgccgtccttggtcttgcccgcaatgatagtctccgtcagggtggaaagaatggttttcttttccattgtccattccttgccgctccacgcgccgtatacattcagatcgtcataggacacgtcccctttcagggtcagggttccgttgggagaaatccaggatttggtactggaatcatatttcagcgtgctcatcggcaacggcccctgctgcgccacagcagccaaatcccagatattccgttcccccgaggcgaaaatacccaaggccacaggggccacttcctgcacctgcttcagcttccagcactccaggtacttggcatattcgtccttggtccagcccaggcgctcatcataaggaacgggctggccggggacaatctggctgacaagctccttcttgtccttgtcgggcagagaggcgaaaacgccgtctatcttttccatgaacggctgcaggctttcatcaagcacaacgctgacggcggcggcttccgccattttgccgaccgggagatattcgtcaactatttccggcttttccgctgcggacagggaggaaaccagaacagggactatcagtgttaaagccagattacggagcgctttcataacgtgttcgtatattttactcaacaaaagacccttggcaagagtcaaagtgagtgttatccgtatgtacatcatgagttggaagttacttttcactaccctgtccgccgctctgagccttgcttcctgcgtgtccaccccggcatcgcgcatccagaaaaacccggcccttttcaattccctcccgcccagccagaaaacactggtggaatccggacaaattgctgaaggaatgtctccgctagccgttttcctggcctggggggacccctccgccgtagcggaaggcaaccttaacgggaaatccgccacccgctggatttattcctccctccagccggtttacacccctcccccctctttctgggccggcccctactggggcggtccctactgggggccgggcttctaccgtccctattatccttattacaatgatgtcacctatgtgccggtaaacaccggatacgtgcttttcatcaacggcaaggtgcaatcctgggaacgcaggcgctgacggaaacggagcctgccctatggcacggaatgcaccggcgcagcagaaggagggcagtctcccgctgatgcgccgtttttctctccgcgtttccgaatgccgctctaatccccgcccctggacagggggcgttccagttcctcccggaatttgggaaagaactccttcaattccccggaaaccttcggatattccagcctcatccccgccagggcctccacaatggcgcacatgcagacaagccgggaataccatttgttgtccgccagcaccacataccatggagcctcccgggaagaagtatggcgtatcatctcctcatacgctttctggtactggtcccagaattcgcgttcgtgaatatccccttcagaaaacttccaatttttgtccggagtatccagccgtgccaaaaggcgctttctctgttcctctggggaaaggttgaggaatattttcacaatgctcgtcctgttggcgagcaggtggcgttccaggttattgatggatctgaacctctcctcccagaaagcactcttggcatgggagggattaaatccctctccggccagaaactccggatgcacgcgcacgctaaggacttcttcataataggaacggttgaaaatgccaatcatcccccgcctggggaggcgtgctacgcaccgccacaggaaatcatggctccgttccagcgtggaaggctgcttgaagctgctgactacgcatccttgcggattgacgcctcccatcacatgcttcacaatgccatcctttcccgcgctgtccatcgcctgcaacaccaccagcagcgcatgagactcgctggcatacaatacttcctgaagctgctccagcaattcgatgcccttttccagcttatccacagcctctttcttgctgtctttgcccagcttgccgagatcgccgggatcatagcgggacaacttgaatcccctgccgtccgtcacccggtacggttcaataaatttcctgcatcttttgaccaggcgggaagaaatatccatcattcctataatgacactgtctcttctcaaaatgttgaaacaacagcaaaaacatcaatacccctctcgttgggagattccaccccgccgatagacgacaaacccccggcataattcggaacgttcatacttgccggaagactctatgggctggagaaaagcagcataatcggctggccgggaaactacgatcaccttataatcagaccatttgtcctttaacgggccgggaatccatccataaaactcctttccggctccattgcataaaagtaaaatgtcaacatgactgctctgcaacaatttgcaataagataccgcagagcggaaatcttcacggccatacaaatcattgcaacgaatacgaatatcgctcaccgcccaaacaatcatcattaatagaaacaggatagtttgggcaatcctggggaacgaccaatcccatgacgccaccagggaccaggccagacacaatacaggcaataacggcgcgcaatgccgtccggaaaaacggaaatccatcatttccgttccataaaggaatacggcccctggaagcaatatcaacaccagcaaagcaggaaccaagggcctctcagcccgcttattccacaaaatgatgccgcaggcagaaccggccagaagaatggcgccggagatcatccctgcccccaatccgttcatattccataaagcatcaggagtcatgcacatcctcaattctagacgggaaggccccatgccggccaatcccgataactcgtacatggaagcgcatgcattgactatccaggaggaagagatggaaaccgcacgggcgcccaagaaaagagtgtaaagataatatgctcccaacccggaaaatggaaaaatccaccagagcagggctcgccgaaacctccgccctccaaactgccggaatgccatgaccatgaatgccgcggcaaaaccgagcgcccatacaactcctgtcaggcttgtaagacataaaaaaaacagagaaccaaaaaagacatggaattttaccggttctccccggctaacctgccaaaacaacatggagacagcgcaagaggctgctatctgcaacatatagggccgcaactcgttagaataataaacaaaaaacggtgaaatcaaaagaatcaccagcgcctttggttcctttctgaaaaaccaagatgacaaaaatacccagaatatattgaagaacctcagcatccattcagactccgcacccgtcagatgatgccacaaaaataaaaggtagtaataaaaggccatttgagcatcgctaccgccaatttcacaaatcttcttccaacatccctccattccctgctgcatggcgcacaatgcagtacaacattcatcaatccaaaaactttggttattcagggaaaaaaagaaagacaaaaaaggtaaaatccaccaatatttgatgcccccgtcattgccttccgccgccctcttttgtcccctgcacatagtgcaaggcaacatagcggattgcatatccggtggcaacatatttttctaagataaaaacatcaataacttttcaaagttgcagagataagaagaaaaaacaaatctattttcatatttatctattgatattcatatggatatgtgatttcttcctgtaaaaaagcaggcggcggatatgcaatccgcaaaaaaatgttgtttatacggatattgcgtaaaataaaaaacttatccaccaaagcggacctgatctgatggggtattttccagcttgcagtcctcaagggtccatgtgcggggaggcagcaccttgttatctttaatcagaatattggcgcatcttctgaattggaaaggtttctgcccccatcccttaaactcgtcattgtaaatgaccttattattgatgaacttgaggttgtccgtagaaatggcgaacagcagcggcacatcgaacgtcttgaaaacattattttctatcagcacattgcgatgatagtaatccctctgcctgtccagctgcttgacttccgggtaaatggaaatgatggcattcgtaaactggtaacgcgaggtcaggttgttaatgaatgtatttttgcggatcaccacttcatggcaggcgccgctttcataccacccctgggcatcccctgccaatagaatggcggagccggaggaatggtcaaacaaattgccctccaccagcactctctccggcgttgtaaaaagagatcctctggcacggttgttgcggacgatattgttgcggaaaaccacggaagggtaaaaatccgcattctccacggcatccccggccctgacggaggaggggagcggctcttccaccgtaatcaccatctccgcggaaatctttttcactgccgtcttcacagtggccgttccgccgggttccagcgtaggaccgttgatgaaacggattttttcaccgggaagaaacacctcaaaccccaccgcctgccgatgcatgtatttgcacttcagggtatggctgtccactacttccatcacgcccaggcaggtggaatgaacattgatggcatcatccatcatcccttcgaacagggctttctccaccacgattccgccccgggtattggaaaaatgggttgcgtccgctccggcggtgtgtacgcgccccgtgcctttcctgaccatgactccgccgcctttcatatgaaagtcctccgatcgctggaccagcagggccatgcctgagctctggtgcagagatacgtcattcagtgatgttttccgagcccggtacaccacgcatcccggatgggggcggttataattccgaagaaccagcgtatcccccggcttgattcccttctgcctgaggttccaggacagacggagacggctcccgcccagcggctccacatgcccgttccagccgatgtccgatgtattggcgataatatgtcccgtccctttctcaaaggccatgcagcttcccattccttcttcccagcctttcccctggaaaacgaacctgttgttccggatttcgtaagggtaggcctttttgtctatttccacttccgtgaaccggtcatccgtcttcacgacgcgcgcctccgtgcaccaggaccgttcgtaatccacggataaacggttgatgctgacattttcgctgtccatcaccaggaggggaaccaccttgccgtgaaaaagaaacagggaaccattgccctccacgcggacattccgcaaatcggccagaggcacacacaccggatgaatcagcggctggtcatggttggaaatatggaaactcatgttcaaagccccctccggataaaaatggtaaatgcctctggggatgttcaaaacgcccccgccctgcctccggagagcggaaacggcagcccgcagcgccggcccctgatcttttctgacgccgggaaccatgccgaattcagaggcattcaccacagctcccttcatcccctgcccacttcctgtcgtcttccaggccagatctacccagtccgcatggtcgtaagaattattgtccacccggtcggccatcaggtaaagatgccgtatgccgttttccgccaccggaatggaaaacttcttcgcggccatccccctcctcatcacgccggaactccataaaacctcggacccgctcatcacgcggaattccacgcttccgtctccatccgcaccgtcatcaattccgcatgcaccttccagcctcaaaactttcgggttttccggaacgggcaggggaatcatggacgtagcgtgcgtaccgattcccgtggcatattttttgccgcctatgctcaaccccgcattactgaaagaccggtccaaccgggtttcccccgtctcctggcgggccatcagcaggctggaggcaggaacttttacggctatggttccggattgggcagcttcttcctcgccccgggactgtgccgggaataatcccgccaaacacgctgcaactacaaaactccatgaaaacatccggctgaacatattttttatactctgttcccgtattccttctatcagaaaaaatatggatcgtccagaagcttccatcagagaaaaagagagattgccttccataccgaattcagggacactgtctccatgcgatcagcattcttcctactgcccggcatcctgccggctctttccgcctgcgggcgcggaggcgccacgcttgaaacggataacgtccaggcggaatggttccccaacggcagcagaacggcgattgtcctggaaggggaaagcgaacccgtttccgaacgggaaatccggcatccccattccggcatgactcttttttaccattcgctgggggacggcagaggaactttggaaatcgcaggaggggttccggaaacggctacagtaacatacagccaaggagcggcttccacggagctgcatttcaaaacggcctcccgggaaatacttctgaatgacgtacgccgcccggacgcgaatgaaaaaacggccttcctgaatggctggagcagccaggaacggggcacagccctgctccgttccgggacagccggagccatgaccacggaaaaaaacgtcccatgaatcttctgagaatactgaaaacgggaacatggaaaatcccgtgcgcacttctgcttgccggggttctggctctggcatgcgtccagtgttccgtccgttccctggtgtacctgccgccccaacccaaggacaaaaccgcgtatctggaaaaacgtgccgcctgggaaccgcatcggcgcaccttccaccataatggggccaaactcagcggatggcttattgaaaaaaaggggcagcccctcctggtatattacggagggaacgccatggatatttctatgatgcttccctacctggaccgttttccccatgccaagctcctggtcaattaccgcgggtacggactcagcaccggctctcctacggaacaggatatcatgggagactccctggctattcttgactccgtgctgaaggaaaccggaagaacgccggacgacgtcatcctggtcgggcaaagcctcggttccggagtcgccacccaggtagcctccgtcagacacgtgaaaaaactggtgctgctggtcccttttgacagccttctggaaactgcccgcggtctcttcccgtacctgcccgtcaggcttctccttccggaccacttccggtcagacctggccgcgcccaaagtcgcctgccctgtcagcatcctggctgcgggagcggatgaagtcattcctccgcaccacgccaaacggctccgggactgtttctccgtaccggtcagttaccaggaattccccggagccatgcataataccatctggctcagccccggctttgataaagcgttttctcaaagcatcgggtactgatctccgttttattccgcaggagccagagacacgcggcgcaggcagcttccttcatgttccagcagcagccatgaggtttcttccggcagcgcttccggaaacaggttggcccattcgacaatgagcacagtctctccgtccagatactcttcccaccctatgccaatcagctcggactcatccttcagccggtaaaaatcaaaatggcatgccaacaggcgtccgtcagcatgctcatgcaccagggaaaatgtcgggctggcagccgcctcggaactccccagcccctccataatgccctgggtcaggtgcgtctttccggcccccagctcacccaccacgcccagaatttcgccgggcattaaaattttacctatttgcctccccagctccctcatttcctccggggaatgagttaaaacggggccgtttctaaaaattttatgccattcgctcatttttccatgaaattttgcttgtctaaaataaagtcatatggtttattgcggctcccgcatctgcgggcgaaccttaacagtgatagcaatggcatacgcaattttcaaaacaggtggcaagcagtaccgcgtccagacgggcgacgtgatcgacgttgaatgcatcaataccctcgaagagggggccgaagcaagcttcgatcaggtgcttatggtggaaaatgacggaaaagtgaccgtcggcacccccatggtggaaggagctacggtctccgccaaggtggtcagccagttccgcggcaaaaagattatcgctttcaaatttaagcgccgcaagggcttccacaagaaaaaaggttcccgccgcgccatgacgaagctggaaatcactgctatcaacgcctaatttcaacccttaatttttatcatcttatggctcacaagaaaggtcaaggttctgtcaagaacggtcgcgactcccgcagcaaacgcctcggcgttaaaaaattcggcggacaggaagtgatcgcgggcaacatcatcatccgccagcgcggcaccaagtggcaccccggcaagggcgtaggcatgggtcgtgactacaccatcttctccctggtggacggccgcgtgttctttgaccgcgaaggccgccgcgtcaatgtggctccggaaggatctgaagccgccaactaaaatacggattactctatctccctgcaggggcggccatccacagggatgaccgcccctttttctgtccttctccgcgctccaataaataacaggaattgttcttgcaaaacaattgcccctcccccactatccacgcagagcatgaaaaataagatatgaatcccaaaacagattccaagcaggccgtccgcaccgcctctaccctgccggtcatttccgggttgaggcttaccaagcaaaggcaggaagtctatcaggttcttctggaacaaagggatcatccaacagccaatgaagtttaccagcgggtacgcaaaaaactccccagcatctccctggccaccgtttataactgcctggaggcgctggtgaaccacggcctggtcaatcaggtcaactttgaacgcagttcttcccgtttctgtcccaatctcgttgagcacggacacttccaggacacccggaccggacgcatttacgacatcaccatcaaggaaggcgtggacctgaaggaattcatcaacttgcccgacgacgtgtgcgtggaagaagcccaaatcaccctgaggggttccatcaccacgccgcagggctaactctctttcatcatcatgagtctggtcattaaaaatttgcacgccaacgtgcaaggcacggaaatacttaaaggcatcaatctggaaattcccaagggagaggtgcatgcgatcatggggcccaacggctccgggaaaagcactttatccaaagttctttgcggacatccggactatgaggtaacggagggagaagcctggctggacggacagaacctgctggacatgagcattgacgaacgcagcagggcgggactcttcctggcattccagtaccccatggaagttcccggcgtttccaacgccaacttccttcgtgcggccatgcaggcccgcatgccccatggggaggaactggatgcggtcaccttctacaaaacgctctatgcaaaaatggaccagctcggcatggcccgcaaattcacgtcacgcgccgttaacgaaggtttctccgggggagagaaaaagcgcaatgaagtgctgcaaatgcttctcctggatcccctctatgccattctggacgaaacggattccggcctggacatagatgccctccgcattgtctcggaaggagtcaactccatgcgttcccctttccggagcttcctggtcatcacccactacaaacgcctgctggactacatcaggccggatgtggtccacgtgctggctgacgggcggattgtccggaccggaggcggagaactggtggacgaactggaaagcaggggatacgagttcctgaaagaagcggaaacagcggaaaaggcataacgccgccaatccggcaatcaatcatgagcgatacacctgacatgtcagagaacgggaacacacagaacctgtttgacttcgaccggagcaaggggaacttctccttcccggaacgccataaatttgatgccggatacggcctgacggaggccaccattgactacatctgcgacgtcaaggaagacccggaatgggtgcgccagttccgcaaaaacgcgcttgccgtttttgagagcaagcccatgcccacccactgggcttctccggatattaaaaaaatagacttctcccaaatccgctactacctctccgacggagaacggcccaaacgaagctgggacgacgtgccggaggatgtaaagcgcaccttcgaacgcctgggcgttccggaacaggaacgccaatttctggcgggcgtggaagcccagtacgactccgaatccgcctactccaacatgaaggaggaactccgcagccagggcgtcatcttcgtcaactccacggaaggcctgaaacaccatgaagatgtcttccgcccctggtttggaaaagtcattcccacgggagacaacaaattctctgctctgaacagcgcagtattttccggaggttccttcatttacgtacccaaaggggttaaactcaaacatcctctccaggcgtatttccgaatcaactcggaaaatttcgggcagttcgaacgaactctcatcattgcggatgaaggtgcggaactcatgtacatggaaggatgcacggcaccccagtttgaaacttccaccctccactccgccgttgtggaactggtcgcgctcaagggcgcgaaaattcagtacgtcaccgtgcaaaactggtcctccaatgtcttcaacatggtcaccaagcgcggccttgccatggaagatgcggaaatccgctggatagactgcaacattggttccggcctcaccatgaaatacccggctgtggtgctcaaaggcaggcgcgcgcggggggaagtcatctccatcgctctggcaaacacgggccagcatcaagatacgggagccaaaatgatccatgcggcggacgacactacgtccaacatcgtttccaaatccatcagcatcggcgaagggcgcgccagctaccggggccaggtaatcatgggcaaagggctcaaggggtgcaggaacaacacggaatgcgacgccctacttctggcagccaacagccgtacggacacctaccctgccatcacggtaaaaggggatggaggcacggtgcagcatgaggcatccgtctcccaggtctctgaagaaatgcttttttacatgcagcagcggggcatcccgaaagctgcagcgatgtctctggccgtcaatggattcattaacgacctcgttcaggaattccccatggaatactctgtggagctgcgcaggctcattgatctggaaatggaagacagcatcggataaggagggaaataatgaaccacttgtttaacgaagaacaattttccgcaggctttcttcccgcatggtttgaagtccggcgccgccatgccctggaacaggcggaacggcttccggaaccttcccgccgcatggaatcctggcgtttcggcacccccggaaacgaatccctggaacatgctgaagcggcccttcctgtggcgccggaagccttgtcccccatcatcagggaacatgcctccatgccggaggccctccgcattgtttacgccaacgggctccccgtgtccatcccggaagagcttccggaagggctttccgtaatggatatggaagactttgtgctccaatgcccggataccgcccggaaatatttggaaacagagacggaaacgctcggttccgagaaattgtcggcattgactacggctctccagcacaacgggctggttattatggcggacagggaaatctctccccctctggaaatactccacttcatttccggagataacgtggccgtttttccctctacgctgctcattgcggaaaccggaagccgcctgcacattctggaacgccaccttagcgcagaccatggccgccaattctgcggagcgctccagcagtaccacctttcctccgcgtcatctgtcaaatacgcgctggttcaggaacttaacagccgttcccgtgccgtggagctttcccatattatggcggatgattccgcggaaatggaacatctcgtcagccatcccggcgcagcctgggccaggcaggagacggtctgcatcctgaacggagacggcgcaggagtccgcctgctttccgccaaccatctgaaggaaaacaaggagctggaccagaggacctgccagaagcacctttaccgcggagcctccagcaacctgctttatgccaatgtgcttgacgatgaagccagcagcattttcagcggcatgatcctggtggcggaaggcgcgcatgacaccagcgcctatcaaagcaaccgcaatctcattctcagccccagagcggaagccaactccattcccggcctggaaatcctggcggacagagtgcagtgttcgcacggttccgccacttcctccatttccccggaagaaattttctacctgctttcacggggcattccggaacagacggcgcgcagaatgattgcccagggctttctgaaacatgtcttggaccaattcggcgatgaaaccatacgtaccgcggtagaaagcatcatcctgccctgaccgctatttcatgaaacccaaaaagacggagagacggacccctatccctccttttccgtcctgatattaacgcgccgctgcaagagagccgccacaagcagaaacagagcagttccccccatcatgctgtaataccattcacggtaaggcgtatggtactgcaggaggatttccgtctgctgttccgaatccggaacagaaacaagaatagaatagcgctcagtactggataaaggaagctcttcccccttcccggtgcgggcgctccatcccctggaatagctctcaagaacagacaattcctttgttcctggcggcacagtgacatggatcttattattcgttctccaatccggaacaacaggagaaaaatgattcttttccccctgggttcggacaaaatagcgtccacggtacaagggattttccagcaagaagaaatcttccgtttcctgaaccagattccacccgtcaaaagacggccttccggctttggcatcacacaacaaatgagaaatgccggccatggcataatctttcggataataatgtccatccgacaaaggtctcagatatctgggctgcaccgtttcataacctgaggccagccttattccatatgtggataaatgattagtacataaaaaatccaagtcattatgaggattgacgataacaacggcaccatcccccacatgtccgcgaaactcggacatccattccggttctttataaagatagccgctttccggtttgtcggaataggcaatccatgaagaagaaaacactatttgttccccaaaggtacataataccacaagtcctgcccaccacttcggataacggctggatatattcaggcgggaacaggcccagccccctacgctgaccagtaaaatcaataaggcattgcgccaatcccaaatcatcagctggtccaggagacgctcgcttctgagcaaataccaggaatgacggtatttttgctgagaagtcgttatgtttccgtcaataaagctatgtaattttaacagcaatggttcatggaaacactgaactgccaccgatacggcaagccatatacacaaaattccaattccccaccatgcaagtctgcgccagataggaagaaccggatgccgcctaaggtcaaataactgccatccggcaagccagctcattccaaaagccatcacaaccgtggagcgtgaatagaggaaagtggaaagaggtgtgcatgaaacaattaaactgacaagaaaacaaaacttggcggtcaacggtgcccggcggttaaacaatgccagaacagccagcacaaaaacaactcctccaccaaatttgatatcgaataaatcagcgccaatcactttggaaatactgattgtctgaggaatgccgaagagcgtcggcatcacagatgtggccagaaaaggaatattttccagcccccagacaaacggcaagcttttacagccttccatgcgcggcagggtgtccacaaaaacatccaaggaaagcaacgccgccaaaaatccggagatcaaataaaaagatgatgatttcagaaaaactttccaggaccagcggtctgcccgtttccaccaatccgcaagaaacacgcacagcaccaaaagaaaaacaaagagacacgcttgcaaatggcctcctctgaatccgagagcaataaagagaatagagggaagatgcacccatttgtttttccttctcccttccaacagggaccagacaatcaacggcgcccagattattccaccaagccaccggtcatatatccacataataaactgggaataaaaactgaaactcacagctcccagcaatacgtacggaatgggaattcccctggatttcagtagaatgatcatccccagccctgcgataaaaaactgcagcaagattcccgcatcccatgccgtccagaaaggaagaaaaccaaataaccaatgatgccaatcccccgggcttaacatggtattttccggcagtgaagtcccattgtgagtataagggttccatcccatatacccatcactttgccaggactgctgcatcgcccagctataaggtaaatattgagaagccccatctacgttatattggttatggacttcctccattggctgagttgcgaatggtttgaacaggcattccacacaatccaccggggctaaaacctttcctccaaacacggcaggagcaaaaaaaagcagtacaagtactgcccaaattattatcccccaccacaagggaatttttctattttttttacaattcatttataataaaaatctgacattagctcctcatgcatccccaaagaaaattcctgtaaattaacgaatgaatttctccacagaattgttaaaaccggcatccatcgttctccttcagccctgaaattaaaccaatgaatcggaacgcctttttctagcggatttacaatccggagtcaagctgtaactctaagagaaaagaacttgcaacgtcgtttctttacgtatcagggcctcttacgtagcacagaaatttgcctgggcccaccctggtgacgggaatacgggaaattgctacgatatccgggcctgaagtagaattttggcaaaccctcttttatagagttcgttgcatgttgaagcggagtcacgtttcaataaccgtataaagagcggcactttccctgagaacaagagtttttttttcttttactgtccgtaacggattgtaaatccgcccaccttctcaagaaagcactatttcattgaaaaatgcttcacccagaattattttcatcctgaattcccagttaagcatcttaagaaaagcatcaaaaaatctggccggaatgatatgaaatagccttgcagccggtttatgacctgtccgacaagcaaattgctaccacaaatatttatgattcatcattccatataaaaatataaataaaaaggaaccggacaaacaggaacggctcggataaataagtagtccgaaacaaaaggaaaccgaaaggctcaccctgtgagcatctcatccggcatccggtaaggaaaacgaaactattttttgaaacaaggaagagtgtttctccgttattattaccgtatggtcacattttacaacatcactctctctaccgccttttccctgctgatgctgtccgtggcggaagcggcacggcccaatgtggttctcatcaatgcggatgaccttggctgggcggaagtgggctgctacggccagaaaaaaattaaaaccccgaacattgacaagctggcctccgaaggacagcgatgggtttatttctattccggagctccggtttgttccccttcccgcaatgtgctgatgacgggcaagcatacgggcaactgcgacgtacaggatttgaaacgcgtggacgcgggcgaaaactggcgcgacctcaaaggagactggcccatcagaacggaaacctacactctgccggaagccatgaaaaaagccggttacgccacagcggtgttcggtaaatggggtattggggatttcggttccaccggagcgccggacaaacacggcgtggacaggttctatggctacacggaccagaaagcctgccacacctactatcctccatacctctggaatgacggaaagaaggaagttctcaacacttccctgacagccgccactatcggacacggttcccagcccaaaggggaagttctggcggacacctaccgcgcggaacaacacagttccgatcttattgcggataaaatgctggaatttgtgaaggaaaaggcccatggcaaacaaccgtttttcctgtattacgccccgctggaaccccatgtggccatgcagcctcttcaggaatggattgaccgctatccccgcgaatgggacaaatccccctaccgcggcaaccggggctatctgccccatccccgcccccgggccgcctatgcaggcatgatttcccagatggaccacaacgtaggacgcctgctggatacgctgaaagcctgtggcctggacaaaaataccatcgtcatttttaccagcgacaacggcaccacgcatgatgcagggggggtggaccaccggttcttcaactccgtagccgatctcaaaggtttgaaagggcagctttatgaaggcggtatacgtgtccccggcattatccgctggcctgggaaaatagccccgggaaaaaccatcacccagccggccttccatgcggacgtgatgcctacactgtgcgctctgacaggagcggatgcaggttctccgctgggaacggacctctcccctgttcttctgggcaaaaaatccgccttgcatgacaggaaacccctggtctgggcagggggaggctacggcggccaggtagccgtgcgtttcaactccaagaaagtcatccgccgcaacctgtttcccggtaaaaaaccggacaactgggaagtgtacgatatcgtgaaagaccccgcagagaaaaataatatcgccgcagaaaaccgtgaccttatcaacagagccatcgccattctggacagggaatatcaacccgcgcccggcttccaggccctgcgttacaaggccccggaacaggtagccgaataagagaacgggaaagaaggttccacgatccgcctccttcgccattctgaccttgacgtgaacggagccggggttagtctttcacgcatgagtttgacatcatccctcctttccagggtgctcggaggcggttcctgctccagagaagaattgatagccctcagccgggaaccgctggaagaattgtgccaggcggccaacgccatccgggaacatttttgcgggaatgtcttcgacctctgcaccatcatcaacggccgcagcggcaaatgttcggaaaactgcaaatactgcgcccagtccgcccattactccacggccgtggaggaatatccccttttaagtgatgaagccctcctggcgggggccaggtacaatgacgaacgtggcattctgcgctactccatcgtcacctccggcaagaagctgacggatgaagacgtggaccggctctgcgccagttaccggcacatcgccgaacattgcggcatctccctctgcgcctcccacggccttatttccaaaaaacactgcgagcaattgaaagccgcaggcgtttcacgctaccacaataatctggaaacttcccgccgcaatttccctaatgtctgcaccacccatacgtacgacgacaaactgcaaaccatcaaatgggctctagaagccgggctggaagtttgcagcggcggcattatggggcttggagagactatggaagaccggatagacatgtacatggacatcgcggcgctgggcatcaaatccatgcccgtcaactttctgacccccatccccggaacgccgtacgcggacatgacccctctgggagaggaagaacagctgcgtatcgtggccctggtgcggttcatcatgccggacggcttcgtccgcatcgccgctggcaggaataccatgaaggaccacggcaggaaaatcttcatgtccggagcgaatgccgccatctccggagatatgcttaccaccgctggcgtcaccatccgggaagacctggccatgctggcagaactgggatatgaagtccgcatgaaataaggtccgtcccattttcgcgccctttgccatgaatcactccgactggtcaaaaaaagatctggaatacatctggcatccctgttcccagatgaaggattacgaaacgctgcctcctatcgtggtcgaccacggaaaaggcgtcaacctgtatgatgtggacgggaaacgctatctggatgtggtcagctcctggtggtgcaacctgctgggccattcccaccccaaaatcaaccgtgccatcaaggaacagcttgattccctggagcatgtcatcttcgccaacttctcacacaggccggctatcactctgtgtgaagaactgatgaagaaaaattcgcgggggctctgcaaattcaatttctcggataacggttcggcatccatcgaatccgccatgaaaatgagtttccaataccactaccagaccggaaaccgtcagaaagtacgtttcatgtccctgagcgacgcctaccacggagaaaccctgggagccctctccgcaggaggcttggacctttattcggaactctacaaacctcttctgctggacatcgtgcgcattcccgctccggattgctaccgctgccccaaggggaacaaacgcggctgctgccaggcggaatgcattgacgcggcacaggaggcctttgcgcgccatggggacgaatgcgccgccctgctggtggaacccctgctccagggctccgcaggcatgcggatgtatcctcccgcttatctggcgaaactgcgttccctgtgcgacgcctacaacgtgcacctcattgcggatgaaatcgccaccggttttggccgcacggggagcatgttcgcctgcgaccaggccggcatttccccggacatcatgtgcgtctccaaagggctcacgggcggctatatgcccatgtccatcaccatcaccacgcagaaaatttacgatgccttttatgcggactacagggaaggaaaagcattcatgcacagccatacctattccggcaatccgctggggtgctccgcagctctcgccgtgctgaaggtcctggacgaggaacacattattccccgggcgcaggaaaaggcccctcttttccgccagatgatcgtggaggccctgggggatcatccccacgtgggggaaatacgtagcctgggcctggtgaacgccattgaactggtggagaacagggaaaccaaaaaaagctttccgtccgagcagaggctggggtaccggatttacagggaagcccttaaacagggacttctgcttcgccccctgggcgacgtcctgtatttcaatccccccctcgtcatttctccggaggaaatggaggaagccgtatccatctgcgcttcctgcatccgcaaagtgctgggataaacgttcatccggtacaacaagacgaaccgttcttttttgaagaaaagatgcaacttttcttcgggacaggggtttgtaaggataccttgcaatctcataccgccatgatacgcctcaccccgctccgcaaacgtccggcgctttccgcgctggtgcttctcctcctgggctccggcttctgccaggctcaggaaatgcttaccgattccgcaagaaaggaagcttccgaatggcttaaggaagtcaaagctggctacctgaacaccagctcttcccgcatccagaaggccgtggccgcccttaccgcggccaccagcacggaaaacgccgccatgaaactttacgtggatgccatgaaggaccggtttctgaaccccaccagcatgatgtcccgcatgctgaaccggggaggcgggggcggcttccgcatgatgcgcatgccgggttccggagggaggggaggcaacagcagcaagcctgacagccccagcaccgccttttccaactggcgcaagcagaatacgggaaacaacgtagctcccggctttaaaaaagcccttcaaatccagtgcaaatggatgctgctttgcctgagaaaagcggacgcggaaaaaaacgaacgtgaccttaacgtttcctccagcgtcctgtccatgctggatgaagtggccgccaacgccaaggatgtaggcgaacagcttcccatggtaagcggagccagcgaagtcatccgcacctacctgaacattggagactaccgttcggaaaccctgccggacaacctgatggatctcaataccatcttcgaccgcgtactgctggctccctacaaggagaaaaaggatgtggaaaacttccggaaactctggaacaaacgcatcggcctggaagcgactctgctgcaaaacaactccgccagcgataaaaaaacagcggaagcagaaaaagccgatttcctggttaaaagacagtgggaacgggaaaaggcctgctttgaactcggcgaccaggtagcggcacttgaaaagatgaaaagcctgatttccggcatcaaggacccttctgaaaagcagcgtgccatccgcgacctggaattcctgcttcttaccccggcggaacaggcgaaactccgcgaagagcgcatgaacaaacgcatgccgggcggcccgcgcttttaacaatcgtcgccaagccccagcctccctcctttcatcccccgttgcgtaacgcgcaccgggggattttacattgcggagagccgcatttccctgacggaggcagcttccttcctcccgggttggaaccatgtcttgcgcaggcggtaaacgcgcacgccctggatattctcatccagatgccaggctgtgcgaacgccgtgctgctcccagatatggcggctgagcatccccatgaacttgctgtccatatcggaaacgtcaccttgcggagtgagacagacaatgtacacattatccctgcacaggttcagggaggactgccccacccaccccatctccttcagtttccgctgtacgggtttcaacggaaaattccagccgcccagcgtgacaacgttcttccgggaacagctccaggccttgcggaaaacagactgcccaggggccagatcgtcaatagtgccgccggacatctggacgcaaaacagggaatcgggctcccggtccacccgctcgcataacaggcgcccggcatccggggaaaaagactccagattagcctcccacacggcggcgcacgcctgggacaaagaaacggagaacgcgcagaacatgggcacgccgcccgcaagagctcccttccccgtccaggtgatgcggatgggacgatatttatccgaccacagcagacacagccctgcaatcaggaacgttggataaactacacggaaatacaggcggtctatgctggccatatacagcagaatcagcaccagcagggagcctacgcagcacaccagggccggagaatccccgcgccggaaagaaacgcggcatgccagaccgaacaaaatccagcaagggagaagatccataacggaatcccatgaaaacagatgcaaggctttctctccacgggcccacgccctgggccagaattcacctccgtcccgcgccaacagaagcctttccagataatccgtattgaatacatccatatcgcaattggtaaacatccggaccatcctgatatcgttggcgaacacgccgtacttttcacactggtaggcgctctcctgcctgatgggacacgtgtccgagagaagggcgcgggcctggttccatgccgccacgtcacatccctccagcacattccggtgggcgtatttattatattcattcagactgaaggacgcaatgagcacacaggccagagccagccagagacgactgagggcaaacagcttttccctggacggcctgagcccttccaggctgcctgccagcaggatggccccccagaaagcatcgcacaccagggcggcatccagccggaccatgctgcccagcacgcacaggaatactcccgcgcaccaccccctccaggaagagccgtacttcaaacacgccagcacacctgtaaatcccgtcagaaaggcggcatggctgaattgcagagcggcataaaagcccggcatgatcagaagccacaccagcagcagaaccagcgtattgaaatcatatctgcgcgccttgcgggcatgcgccgtcagcatcgtgaaaatggccgcgccgctggacaacgtggcaagcgccagaaacacaggccagacggacaccccgccaagaacaggcgcagctttcaacagaagcccggtcaacaggggattgacgaaaatgacatgggcatccgcataagagggatccccccatccgtcaagcacggacgcaatcaccagatcgtcattggactggtacgccacgcccacaaggctccaggccagaaccagaagcaacaggttgaaccatacgggatggagcagaggaaaaagcgctacccatctccaaatctgtttcaacataagcaaattccctgactttacagactgttttccctgtccggggacgcatactaggaacggggaaaatgaaagtcaagagccgatccggatgaacaaaccggaggggctaaaagactgcgacctcttccttaacggttcaggcagacgataatgcccgcgataatcatcgcgttgccgcccactttgcgcatggtgatcggttttccgaaaaaaatccggtcaaacaaaaggatatacacatatgcggagcattccagcatgttcaccgtaatcatcggcaggtgggacaggcagtaaaacgtcagcaggcagcagcccaaaaaaacggaatatgccgccatcgtggccggattcacgaaataggcaaggccggtcagccggtcattcatggcggactttttcaaaaccacctgtgtacaggaagccagaaaaacggaaaacaggttcagcccaatataaaattcctcactcatgcgcctcctccgtggaaatcaaaataatacccccgatgaccagcgccgctcccgccgccagcgtccaggaaagagcctcccccaggcaaagccatgccagcaggataccccagatgacaacggcggaacggttggcataagccactcccaggttgaattttttcagcatgacctgccatcccgccgcataaatgcccaacaggaacagcacgccggccagcagggcaaaccggcgccagtccgtccagccgtagggggcagccatgcgccccagcacggtattcagcgcgtaaacgataaacagcaggtgcagaatcaggtagttgatcatgaaagaaataaagagccgggaacaattcactcataccggcgcgccaccactacggcgggcctgtgcttggtttccttataaatcttggaaatgtaaatgccgataacgcccaggctcatcaaaatcaagcctccgaccagccagatggaggccacggaagaggcccaaccgggaggggctacattatacagaagctggcgcacaaccacccaggcgacatacagcatggctaccagggtgaccgccaggccaaagtaggaaatatacaccagcggcctggcgctgtaggaaaccacggaattcatcgccagcgccatttttttgcggaaagtgtaggtcgttggagaagaggatgctttcttcaccctgcacggcacctgccggaaaccggcggaaacgcacagcccaaagaaaaaaggctcccggtcctggaatttcagcatctcccgcagaaaacgcgcgctcatcagccgcgccgtaaccatattcctggtaatctgctggtcggaaagcaaattaaacaatgtgtagaacaattctccggaaacggcttcaaacaagccgcccttcctcttctcctgcaccccgtacaccacatccgccccggtagaatccatctcacgggaaaaatcaaccagccactcgggagattcctccaaatcactgtcaatcaagaatacgcgctctccccgggcttcttcgcaggccacgtacatggccagatgatggccgaagttgcgggataaatccaccacgcgcacccggccgtccttctcccgctccttcaacgcctgttccagaccgtcccttgggcagccgtcattcaccagcaccacctccgtgcgggaggggtcataacccgcctcaagcgcggcggcgaaactgcgggaacagaactccgccagataaccgcccgtacaatacacggtagccacaatggacaattgaacctgtggatcagtcataacgcttttacatacatgagaacgcgcttcctttccccgcttttcacgcacacctcgtccttttccggaacacgggcaaaacccatgcgctcatgaaaacgcacggaagccgcattgtcctccagaatccgggcatataaccgttccaggcccagctcccctgcggccagctccatcatcccggcatatgcggcggaagccgggcgcagttccctgaatgccctgtcgtaaagataaatgcctatctctccgcaacgcgtattccggtcaaaccagggcaggtaaaccagacccagcggaacctggtccgcataaatcacgcaggcgcgggcatcctccccgcggacgttcctttccagccacgcccggtgctgctcctccgttacctggtccaacaaaaaaaacgggctgaccctttcggaattgcgccacacgcgcaggcggctgcgcatggcctcatccacaccagacacgttgaccaggcaaattttcatcatgattcaactccctccagcccgaagccggcccgcaacacctcccggcagccttcttcccccaaatcgtaatacaaaggaagcctcagcaacgtatcgctggtacggtccgtatgaggcatggccccggcagaacgcccgaatctcatcccggcaggggaggaatggaggggaatgtagtggaacaccgctttaatcccgtgctccgccagcttgttaatcaagcgcgtgcgctcctccatggaacggagcagcacgtaatacatgtgggcgttatgcgtgcaatgctccggaatgcacggacgccgcagcaccccctgttcttccaatggagccagcgcgcggtggtacatattccaccacttcagcctttccccgttgatctcctgcccgtgttccagctgggcatacaaataagcggcggtcatctctccgggcagataggaggaacctacgtccacccaggtgtatttgtccacctgcccgcggaaaaacctggcacggttggtccctttttcccggataatctccgcgcgttccatcagggaggggtcattcaccagcagggctcctccctctccggaaatgacattcttggtctcgtggaaactgtaacagcccaaatggccgatggagccgagccgacgccctctgtagcaggagccgacgccctgggcggcgtcttcaatcacatacaggcgatgcctcccggcaatttccatgattgcatccatttcacaagccacgcccgcgtaatgaaccacgcaaatggcgcgggtgcggtccgtgatggccgcttctatcagcgtctcgtcaatattctgcgtatccggcctgatatccacgaatacaggaacgccgccgcgcagcacaaacgcgttcgccgtggagacgaacgtataggaaggcatgataatctcgtcgcccgggcggcagtcgatcaacagggccgccatctccagcgcggcggttccggaatgaaccagcagaacctttctggcgccggtgcgttccgcaagcagttcatggcattttttcgtgtaatagccgtctccgcataaatgggcgcgctggatggcgtcccggatataatccaattcgggaccgtgctggtgaggttggttgaaaggaatctccatggcttcagaaaagaccggcccatgacggacgcccggcgcgggcatgccgatcccggcggaaggcgttccccgcctcccgcacggggagaccctactatgaacggagggctgaaaacaagcctagaccttgatgaaggtccggtttttgtacatgtaatacaacacgccccaaatcagggcgtaattgcacaggtaaaagacaaacctgtccgcatccccgaagcactcgctaaacccggcaaacaatacccgggagaaattgcccgtaggggggcacagagatacccatatgtacacgaaaatggcattgctccctattacggagaaaaagaatgtcaaccagttcaatttcagcacatccgtcagcagatagaacagggccagcagaaaatagcaccatcccgccgcccacaataccatggaactggtgaacaaacgcttgatcatcggaaaatccaggctccagacatatcccagcgccaggcagcccgcgcccgaacataacagccacgccagctttttcccgtgcccctgcacccgcttcagaatctggccgcccagcagaccgagcatggtcatggcgccaaaaccgaactgcgccagaatccacgcataattcgttccatcctgccagtttcccatcaggtatttatccagcagcagggccagattcctccccggttcaagcattcctgccgcacaggaacccaccgcggggtcagaaaaggaaacaaacttcatgaccagccagtacacagccagcagcccccccgttgccgctacctgccaccggatggacagatgaagaaggcaaatggccgcaatcaggtagccggaggcgatggcctggagcgtattgcagtacagggacatcctggacggttcaaaactcagcagattgccctgcaccaccatgcccagcaaaaaaagcaccgctacccgcctggcaaccttcaggtaaatcttccacaagggttccgagccgatgcgtttggaaaaggaaaacggcatggccgttcccacaatgaacaaaaagaggggcatcaccagatcccaggcggcgaatccctcccaagccacgtgcgtgctgtgcttcaccagccactcggggctccggtcgtaaaaaagattgatgcttaccacaaccagagccaggcccccggtcaggaaaaacatgtcaaatccccgcagggcgtcaatggccgcaattctctgcggcctggtatcggaaagtgaactcatggcaacattccaactacggcaccacgtccgccaacctttccaaagactttctttttctaaggctccgcaaagaaaaacggctgtttccggaaaaacctgtccttcacggcaactccgtcatgatgcctttctccatattccctgccccgcatttcatgctatgctgcccctgcaacatgaccatggggaacgaccaatccggcgaacgcgacagcttccggaatattgaaacttacgctcgcatgaaaatggatgaacttggtctggcagactggcaattcggctgggaccgggccaaaagaaggctgggagtgtgccgtctgctggaaaaaagcattacgatttccattcacttcgtccgcgccaacctggagacccctcatgaaatccgtgacacgattctgcatgaaatcgcccacgctctggcgtggacccgccacggagaacgcacccacggaccgcgatggaaacaaatttgcagagaaataggggctgtcccgtgtgcctccgccaaaccggacgccatccgcgtcaccacgtacaaatatctcctgcgtctgaaaacgacgggagaaatcgtcggcaaataccaccgccgcccctctttcgccaaatacctcaagcgcatggccctgaaaggccgccccgatacgctgggccagctggagctggcgccttatgaagaataatctccacaaaagctgaaaaaacgagtcgtttccggctattctccagcatcaacgatcatcccattccgggcatttccattttttacatctgctcattatccggaacagcagaggaaacactcaaggtgcgctggcgtacgtaatcgtacaccttcgggtcgctgtctccggctgcccagaccacccgcaggaagtcggcgggatgaatatttccgtgatcccggaagaaacggcggtcattctcacagcagtaaatgatgtcatcccccatggaaccgacgagcttggcccgcgccttggcaatcaggcgcggaaggtaggggagaccgcagagttcgtcgccgaaccccggcaaatcatacccgatcacaggtttcccctggtaaaactgcccgtgctggacggtcaggaagaagtcccggcgcgccgcagccatcagcagaaccgtggtgggggaaggttctcccgtacgggcataggtttctacaaaatcaaacaattcccgagtgcggcagccgatggaagacagaaagataatttcctgatccgtaaagaagccgtccacattcctgtggccttcatggtagcgccccaccgcttcgcggaaaaggtcgtaaaacgtatcgttccaatcttcttccatcatcggcccggcgatttatgtttgcgcttgaagttaagcatcatgatctgcttggtcagattggcttcaaagcgggcctgttcctcgcgggacatttccgaacgcgtcttgagcacctcctgcgcttcctgaatggcccgttccacgctgccttcatcaatctgggaggaattaagcgcgaggtcggttaccatgagaacatggtcgtcattgacctgcacaaagccggtgcccaccaccatgctttcctccgggccgtccatgggcttgtagcggagttcccctggttctagggaggtaatcagggccgtatggtgttccagcacgcccatctccccgagactgccgggcagataaacgtattctacagtagcggcaaccgccacttcatccggggtaatgactttgaactccatgctcatggttcgggacggcgggaaaagggttatttggcttccttgaggacgtcatcaatgccgccgcgcatgaagaaggcgtcctccggaaccatgtccagcttgccttccaggatttccttgaagccccggacggtttccgccacgggaacataggcaccgggaatgctggaaaagacttccgccacatggaacggctgggtcaggaagcgctgaatcttgcgggcgcggctcacgatgagcttgtcttcttccgaaagttcgtccatgcccagaatggcaatcatatcctgaaggtccttgtagcgctgcagcaccatctgcacgccacgcgccacttcataatgctcattccccacaatttccggggccagggccttggaagtggaagacagcggttccaccgccgggaagagcccctgggccgccagagagcgttccagcaccaccgtggagtccaggtgggcgaaggttgtggccggggccgggtccgtcaagtcgtccgcaggaacatacacggcctgcatggaggtgatggagccgtgcttggtggaggtgatgcgttcctgaagatccgccatttcctccgccaggttcggctggtaacccacggcggacggcgtgcggcccagcagggcggacacttccgaccccgcctgggagaaacggaaaatattgtcaatgaacagcagcacgtccttatgctcctcgtcacggaagtattccgccatcgtcagggcggacagggctacgcgcagacgggcgccggggggttcattcatctgtccgtacaccagcgccaccttggattcttccggtttctccaggttgatgactccggattctatcatctcattgtacaggtcgttcccctcacgggtgcgttcccccaccccggcaaaaacggagaggccgctgcgcgccttggcaatgttgttgatcaactccatgatgagcacggtcttgcctacccccgcacccccaaaggcaccgattttgccgcctttcaggaaggggcagataaggtcaattaccttgatgcccgtttccagcacttccgtgctggtggattgttcgtccaacggcggagcgccgcggtggatgctcttcataccggcgcaggagagtccgccgcgctcgtccacagcttcccccagcacattgaaaatacgtcccagcacgcactgtcccacaggaacttcaatagggcgccccgtgttgcgcaccggcatcccccgccgcagaccgtccgtagaactcatggccacggcgcggacccagccgtctccgatgtgctgctggacttccagaaccagggtcttgcgcttgccgtcaacttcatagtccacttccagcgcattgagcagggcggggagcgtttctgcctgggagaagtccgcatcgaccacagcgccgatgatctgaacgagaatgcctgtgttattcatcatgggaaaaacttggtgttgaaatggagaggaaagaatgttctgtttgaaaagcgggtaaagaaagcggaaccatgttattccatagcgcgcatagccgtggtaatttccagaagttcgttggtgatttgcgtctggcgcgccttgttgtagtccagggtgaggccgccgatgatgtttttggcgttttccgtggctcccttcatggcgaccatgcgggcggagtgttcggatgcccgggcctccagcacaatctgaaccagtccgtggaaaacgtaaagaggcaggatggtatccagcagagcagcggggctgggttccagcaggaattgcttatgggcatctgctccgtccagggaagagcctccggctttcgccatgttcatcaggggttccggctcaatgggaagaagctggcgaaagacaggcttctggaccattgtgttcacaaaaccggagaaagccacgaaaacgcgcccatattcctccgccttgaacttttgcacgatgaaatcaaataccggctttagttccagcagggacaggggatccgtcaggctccaggtggcctccaaccgttcattcaatttggcgagcgcagcattcagcttgcggccgatggtgatgtaatgggcgttttccggggcctgttcccggaccattttgatcaggttggcgttcagcccgccgcaaaggccgcgatccgtattcaccagcagcaccagatccgcgccgccgtgggtttgcatcagagggctgttgctggtgtcaatttcatcctggagatggtagagcacttccgccagggcgcggatataggggcgtcccttgacggcctggtcctgggcgcggcgcattttggcggaagccaccatctgcatcgccctggtgatctgggacgtgtttttgacggacttgatccggcgtctgatgtctctcagattgcccatgtgtcagtactcccgtaatcgttagttccagctgagcttgaaggattcgatagcggctttaagccctgcgtctatttccggcgtcaggtctttttccttcagaatgctttccagcagatccggatgctgatcctgcatcaccgcttcccacgcattctggcattccttgatcctgtccaccggaacgtcgtcaaagtaccctttttgcatggcatacaagtcagcggcctccagacccagggatttgggctcatactggttctgcttaaagagctccacgatgcgctgaccgcgggccagcttggccttcgtgctggggtccagatcagacccgaactgggcgaacgcctgcaattccgtaaattgggccagatccagcttaatggagccagccagcttcttgataattttcgtctgggcggaggaacccacacgggagacggaaatacccacgttgatggctgggcgcaccccctggtaaaacaggtccgtttccaggaatatctggccgtccgtgatggaaatgacgttcgtgggaatgtaggcggaaacgtcgcctgcctgcgtttcaataatgggaagagccgtcagggaaccgccgccgtgttccttgttgatgcgcgcggcgcgttccagcaggcggctgtgcaggtagaatacgtcccccgggtacgcctcgcggccggaggggcggcgcagaatcagggaaatctggcggtaggccacggcatgcttggaaaggtcgtcataaacgataagggcgtcttcccccttgtccataaagtattcccccatcgcacagccggcgtagggcgccaggtacagcatggcggcaggatcggaggcggaagccgccacgacgatggaatatttcatggctcccgtttcctccagtttcgccaccaggcggctgatgttggcgcgcttctggccgatagccacgtaaatattgtagagaggctggtgatcaggaagcttgccttcctccgccagacggttctgttccgcctgggcaatcatggtatccatggcaatggcggtcttcccggtggcacggtccccgatgatgagttcgcgctggccgcggccaatgggaatcatggcgtcaatgggaaggatgccggtctggacgggcacggaaacggattggcgggagatgatgccggaggcgattttttccaccgggtaatacgcttccgcctcaatcggccctttgccgtcaataggttctcccagcgtgttcaccacccggcccagcagggagcggcccacgggcacggaaagaaggcgtccggaacacttgaccagatccccttccttcaacttggaatcatcccccagaatcacggcgccaacctcatgttcttccaggttcatcgccagccccatcaccccgccggggaactctatcatttcattgagcatgacgccgctcagcccttcgatcttggcgacgccgtcccccacggaacgaatgacgcccacgttttcctgactgacggaagccgtggctttttttatttctgcttcgagttcttgaagtatgttgctcatgggaaaaattcgttggttaattggaaagggtgcgggccatcgcagccagacggtcgattctggaacgcacggaaccgtccttcacgtcgtcccctacctggatgcggacacccgccagcagagacggttccacctcccagcggtagtagaggacgccgccatatctggcctccagtttggcctgaatcagggaacgctcctcttccgtgaggggcacggcgctttgaatagtggctgtacggcttttcaccgcatattccaccatgccggaaaaagccttcagcagagcggcataattgcggggcttgcgttccgcaattttccgggcgatcagacgcacgcggtcctccgccacggcattcccgtccatacagagccggaacagcctgcgggcggcattttgcgtgtcctttccgatcttcataaatatttcaggaatccaggctgtcgatcgcttcccggttgattctccgctggtcttcttccgtcagcatttttccggtaacctgggccgccgccagggccaccagctggccaaattgttcttttaacgcttcacgctctttctgctgttccagttccgcaagctggcgggccttttttatgatttcctcagccttccgggaggcttccgcttcctgttcttccaacaggcgggcggcggcagccttggcggcgtctattttttcctgtcccttttcccctgcttccaccagcatttcatgcgtctgttcctttacggaagccagatgccgctcactttcctcacgcatttcctctccttcttcaatacgctggcgccttttttccagaacattctggatgggtttgaacgccagataacgcaggatcaccaccatcaggatgaaagcgatcaggttggcaacaaagggttcccaactcgttaccccaaagggagcaaaaggattccaggcttggtcagctatgagattcagcataagatgagcggtttgaacatgccggaaatttttccggaccggcagggaacgggcgcaccgccccggagcggagaagctccctccggggacgaaacttccgttttatttcacaaagatggaaatcagggccacgccttcaatcagggccgccagcgtgatggcaatcaccataatgggggaggaagctccggggttgcgtccggtggcttccgcggctttcgcaccaatgaggccaatgccgaggctagcgccgatggtgacgaggccgaaacctacgttgccggacagttcggccagggaggtcattgcgataggatcaatcatgttattggtatggtttatgttttttgttgaacgttcccccacaggttgcccatggtccggaacggaaagctggcggtacggtttatgaggtttttccaggcggcaggcggtccggcaagggaagttccttctcctcatttttggaaacatggccgtgggcgttatcgtcccccacctgaagtttcaggaaaatcgccgtcaaaagcaggaaaaccagggcctggatgaaccccaccagcagttcgatcgccagaaacggcagtacgcacagggagctgagcacgggcccgaacatatgggccatggtgtcaataatcgtttccccggcgtaaatattgccgtaaagacgagcggccagcgcaatggggcgaatcgtgatgctcaggacatccaccagtcccacaaaaatgaagatgaacaccagcacgaatcccatgaaccccggcagtctccccttggggccgaacaggtgaataaagaagcctttcagcccctgctcccggatagaccagtaaagccacatcagcgcataaaaaatacccaggaacatcgtcacgttcatgtccgcattcgcgccgcggaacagcggcaccccatgataggtgatggttcccaccccgggaagaagccccatgtaattgctgaccagaataatggtgaaaatagttccgaagtaccagaagtacttgcgcgtcaggcgcggacccagaagggactggacaaagttgtacagagtttcaaaaaagtattccaccgcattctgtaaacgggaaggcaggatgcgcatagagcgggtggcggaccatacgaccacccctatcaaaagaaccgccagaaaaagcatcagcatcgagttggacaccgggagctcaatgcctccgggcagaggtatggaaaacaaatggggagcggcctgttccaatccgtgctccgctccttcctccgccgcacaggcgctgccgcccataacgccggacacggtcaatgccgccaaccacaggaactggaaaaatctgctcattgtctgtcttttaccattactcgtgccaactcctgtaaatactggaaaaaggaatccattccctttatttgacggttttgattgtggactctcctctttattttggcaagcccaaaactcggcacgcacacaaattatatacatttgtacataatcttgaaagaaacctggatgcccgttacaacatcaacaaaatcttttctccatcaacaaaaaagcttccgggaatccatcccggaagcctgcaggcagaactgaagggccgttacttggcggcggaaataatatggatgtggtacacgtctctgccgtccgcggccttgcgccccgtggcatgaattcccgtaacatcggaagtgattacatcgagggtttccacagcattccgaagctccctgctgctttccgccgcgctcttcagggcgtcacgaaccggaaccaggttaagctgaaattcgagaggggctccctgtgccggagatttcacggattccctgaggacttccataccgaaggccttcggcatactgaccgcccagcgggtatcggaaatgattaccaccgggttcagatcggcgcccaaaggacactggtaatcgtaggtagtgatatccccgtccacagaagactggggagcgggcaactccgccattttaccctggctggccagagtgacgacggttttggcggcattagccactttctgccaggcttctcccagggcggcgcggtttttcacttcatatgcagcggagaaacgcggcgccagcacattcttgagcatgggactgggagcgccctgcatgtccataatgaacacgcctgaacccgtaaggccggaaagagcagttttataagccttccagagctcctcaatggtaggcctagccatctggatcataggggcggccatgcgcacctgatcgctcacatcatgcttcggattggaaatataggcattgccgtagtcccatacaatttgggcaatattaccacacagggaacagcccatatccatcatctgcggattgaccgtgcaggaggaatacagcaccgtggacgcgccaggacgcacggcactcatggcggaaggagcgtccaacttgtagaattccagcggatatgtgcatgcttccacatgcaccccctgatcctgccacgagaagtaggaaacggccgtagcattccgggccagcttttcatacatgccaagcatgctggccttgatggaatccagcgccgtcatggaaggagccagatcggcaattttccaatcggcgcctatcgtctgcatcacatccttcaacccggtgagcatgcccttgtaataggccaaatccatgttaataacccctttgacggaagctttgtctgcgaacagcagcccataagccggatactggaaccgtgcatccgccatggagaaatcaggacgggacagcatggattcctggggtgaagaggcgatacggacctgtttttcaggattggtggttataaagcctaccagggtatcatccacaaaagagacggccacatacagcctggattcatccagacgaacgagcgccgccttaagacggtccatattttcccgggaaatctccatccggtctttcgcctcatccagcatttcttccagcttcgcacgcacttttttgcagtccacttccgctaccttgcaggccaggccattgtaggtcttttcatacagggaaaccattccatgcagctccatatcctcctggagattggcgtccttcaggaaagctttggcctgggcctgggcttccggcgtcagtttggcggcaatcatcacaggcgccgtcgcagcctgggaagggcgtaaatccatcagctcagcccactgcacaatcatctcggccccctggccgcccatgacctccgcccccgcaccatcggcatcctcatttccatcctttaccccctggaaaagcttgtaaacggacaaaatttccttcatctggttcaagcccatcttggtaaaagaggactgcgcgctatccagccacggagcccattcgggacccaagccgatcatcgcgtcaatgacagggctgctgaaagaacatttccgctgcacgggttcggaagcgtcttctcccggaatggctatggattcatcggcatcctccccggaggagcaggaactccaggttttcaccatgttcaaattctgaacgctcttcatgatgccgggaatatcgtaaacacccgccatcatccccatgtccctgggaaagagggcggctattccgagccgttcggcacgcttcgccaccaggtcgggagccacggaagccaaaggatcaagagaggcggcgggagtcaagtcggctgcatcctgcccggccttggcggaagatgattgatgatcgtcagagcaggcggcaagagcgcaggtcagcacaaaacagggtatggagtagaaataatgctttttcattatctttaaacatggggtcatgatgccatccggcaagcgcgctgcttccttgcggcaacagcccctatcggcgcatctttctcattatacaggcgtttccccgcacgacgcaagcacaatgcaaaacattaacgcactcagggcgtgcatgacgttgctgcgtggaaaaccttttaagcgccgccagccatccccgtatccgccagattttcctttttcccccgccaatattgtccgggaaaaagccgttccagaaaccgcaaaaactctccggctttctctaagaaccggattaaagaggttccgccatgggaatatcatcctccggcaggggagactgcggcgcaggagtgtttacggaagtggaacggttgagatggcggggaatctgctggggcagtccggggatgtaatcggaatcaccccggcgcggcgtgaggggggccgcagaaggctcctccgacaacggaggcgccgacggcccggcaggccttgaggagccgcccaccggggttgccttgatttcagcatcggaagagtcatccagatcggcagggatttcatcagccttgatcggctccatcccttccggatcatacaagccgggcggcagattgtccggcacgacggcaggcgccccgctccgttcccgaagagcggccgcggccgtttccggggtctcctccaccggttccgccaccgggatgtcatctttgggcgggtcaataatagccttgatgtcttttttctccgtttcgaaaaattcctttacgatgggagcggcggcagcccccccgcccagccgctcgtgggcgcggccttcatacagcaccacataggcaaagcgcggattgtcgcagggcatgaaaccggcgaaccacgccagacgcttgtcttcccgttccggcccccattgggccgttccggatttgccggcgatactggcataagacaggcgcgcacgcccccccgtaccggcttcaaccacttccctcatccccttgcgcacgctggacagagcacgctcataggcaggcagaggacgttgaacttcctggggcttgggcgcgtaaacgacattggcgttgccgtcctgaatctgcttgatgagctggagcctgggcagatacccgtttgccacgccggacatcatgtgcgccacctggaggggcgtaaccagcagcgtcccctggccgatggacaaattggcagcatccccggacatgaaatcgcgcttgtaattgcggatcatataatcactggtcggcaccaggccgggatcgtccggaatgggcaggccggtccgttcccccaggccgaaggcgcgggccgtatccatcagggcttccgcacccagcttcaggcccatctggtacatgaacggattgttggacatcgccagggcgcggacacagttgatatcccccaggggagtcttgctccagtttttgaacacgtggttgccgatcgtcacggaagccgggcagtaaacgagcgtattttccgtgattttgttgttcctcaaggcactggctaccgtcaggactttaaatgtggaagcggggggataacggccctggaaagcacgggcgcccagaggaccggcaggatcattgcgcaaagcatcgtaatctttctgggatatgtttggaatgaacatgttcgggtcataggacggcgtggacgccatcaccagaacttcacccgtcacgcagtccagcaccaccatggcgccgcgcctcttgccgcgggaaaggatgcgttccgcatccttctgccatttcaggttgagggtggtgacgacagccccgccgggcttggggcgtatttgcagttcatccagaattttattgccgtcttcgtcaaacatcaagcgccatacgccgggcgttccggtcagatttttgttgaattccttttccagccccgcacggccttccacctgctcccacagcggatccatgtggttgatggggccggttggcagttttcccttggaccccacatagccgatgatatggctagcgatttccttctccggataggaacggatgtaaatgggcaacagctggaggccgcgcacacttttcaccttatccttcagcttttccgcttcctccgcacgaatgacgttcgtgagcggaagaggcagccagcggcggtgctcataatgtttccagagctgttcgtcggaaaaagaccatgcctttccggcaatttttttggcctgttccaaacagttgcgcccgaattccaccacgcgggaacggtcggggttttcaaaaatttcaaaccgcaaagccagctggtaggctacggaagtcacggccagcggttccccgttgcggtccaggatggggccgcgcggagcgggaatcagcagagccatggtcctggcggaaggccgcgtgctggtgtgcgcttcccgcgcagcgtccagccgacctccgccaagggaaggaatcagggacagggaatccaagccattctgctccttttccgtttccctgggcatctccggagcggcggccacgccttcctgttcgccggaagccgtgtcggaatccttctttttgtcccctaggtcaaccgtttccacggcgtcatcctttccgctctgttccaccgcagcccggccagcggccgctcccccccgggaagacgggcggtgcgtggaagcctggccccaggccgtatccgccgtccacgcggccaaaccggccaacaataccagggaacgtatcagaacctttattttcatcagcttgcaggattgtggcaaatataccgcaaggaatcaacgattattcacgctcacgcttattcctgaacgatgacggttgttcccaggccgcatttgtcaaacagaatgcggcatgcctccaccggaacccggatgcacccgtgggaattggcgtcccggaacacggtgcccacatgcagccctatcccgccgtgaatgcgcatccaaagaggcattttggcgccgatgaatttaccgccgggaggcacgcgggaagaagaggtagcatccgaattcacgcacaaaccgcttgcatcaaacacgctgccgtaagaccgggaacggtaatccgcatctttttggatgatggaaaacttgccgcgcggcgtttcatgggcggatttgcccgtgcaaacgggaaagttcatagtcggcttgccatcaaccaacaacacgccgcgctgatccttcagatgaatgacgattttgctgttccgcgtccccgcctggcggatacgctcgtcatgataccagatatcgcgcgtgaagcggtactggggatccgcgacaaaagcttcataggaagaagcatatctgccgtccttcatcaacggctttccatgaggcgtcctgggcgtggaggaacaggcagccagcagcagggaaacacacaggaaaagaagaaacgagagagcggcgtgcggcatgcggcctgctttaccctcttcccccgtggaaatcaagcacgattcccctccgttccggcatgtttggagtaatcctgataaagacgcccgtttatgcccgtatctgtttccgttctttctctctgccgtcatgaatgccgcttcttccgttcccacccgttctccccgcctgcactccctggacgccctgcgcgggctggacatgctcattatcctggggctggacgccctgattctgcttctggcctccagaaatccggaaaacggcttcctgcaagaagccgcgcgccagatgacccatgcccgttgggaaggattacacctgtacgatctggtatttcccgtctttgtattcatatcgggcgcctccatgtccttctccctggcgaaatacaccggcacctccatcgcccccggactcttccatctctggaaacgggctttcggcctggcttttctgggccttctggtcaacggaacgcttacctggacggaaagcatgcgttacgcctccgttctgggactgatcggtttttcctgcgccattgcaggaacctgcatcctgctgtgccgccggacgggggcggttgcctcagcagcgggattcatcctggtcctcattaccctgcttcagttcacctgcggcaattttacgccggacggctccgtcaactcatgggtggacaggcactggctccccggccgtctgcatgggggagtttttgacccggaaggcccgctctgcgtcgtttccgcctccgccctgtgcatgggaggatggatagcgggaaagtttttgaaagaaagctggctcccccccgtgcgcctctgcacggcaatggcaggagcgggccttctccttttctgcaccgccaggatgctggacggcacctaccccatcattaaaagcatgtggacagggaccttcgtcctggccgccgcaagcatttccctgacgtttctttccctgtttcatctggccgttgatgtgtggaacgaagggaaatgggcccaatgggcatttcccctccgcgttatcggcataaacgccctggccgcctacctcatccactccctgctcaatgtgcatgaacttaaccgtcgcatcttcagcggcatggcagacctcttccccccgttccagcccgtcttccttgccgtgtcccttctgctgctgcaatggctggccttgctcttccttgacaggcggcgactgcctttcatcaaaaaagcggtcaaatgaccaggcggcggataccccgggcatggttgccggtgctccccgaaaaaacggatactcccctgtgaaacggccagccaacattatctctttcccccaaagtcctaaaaggagaaataaagcggaaacatcattttttgctcgtttcagggaaaagctctgccaccctttccggaaagaggccaagcacgttccttccatgattgtcttccggttcccctgccccatttcctaaccccatgatcattccatgaaagcattcatgttcccagcccttgttctggcggccctgaacatatggactggcgccgcccagccccggacaaccgccattttacctgtaccgggcgaaaaggcgtgccggcttccgcttcctccctaccaggccttttgctggttttcagcggaccgcggccgctggcccggagacggcaaccgggttctaccctggttcggaaggacggcccccggcaacctgctggacagaaagccgaatcccagcaccgccaaaccgggggaccatgccatgttcgccctgttccacctcaaagacggcaatttcatggccgtgctccccgtcgccgcccctgattccctcgcgtggctgaaacttgaaagggacggaacattccttgtggaagccggttcgctgggaacctcccccgccaaaccgcaggccgtcctggccgtcaccgccacggacaaggatatttaccgcgcctgttccgccgtatggaacaaggccctttccctccctttcatcaagggcagaaccttgccccgggaaaagaaaatttatccggaaccgttcaagtacctcggctggtgcagctgggaacagtataaaaagaacatttcctccaagctgcttgaagaaacggccagaaaactggaggcatcccccgtccccgtccggtggatgctggtggacgacggattccagacccaggaaaggcttcagctggtcagtttccagccccggcaggatcaattcccccggggctggcagcccctgatgaaacacaaaagccccaaattgaaatggatgggcctgtggcactgctattacggcctctggaacggcatccaccccaggcaccgtctgggtgacgagactgcccgcggtctggtccgtaccgccaaagggaaaatcctccccggtgacggctccggaggagccggagcgttttatacccccttcctgcaatccgtcaaagacgccggattcgacttcgtgaaaattgatgtgcaggcggaatacctgaagcatgcggacgggctggacaacccggtccgccacaataccaagtgctcggaagccctggaacaggcctgcctgaaaacagggctcagcctggtcaactgcatggcgcagggtaccgtcaacattcagaacacgcgttacagcgcggtcacccggtgcagcattgactacaagctgggagatgaagccatggccaaatcccacatcctccagtcctacgccaataccctctggctgggacagaccgtgtggccggaccatgacatgttccattccacggatcccgcctgcgcccgcctcatggccgtatccaaagccgtctcaggcggccctgtctatctttcagacccggcagacaaacttaatccggaaaacatcatgcctctcgtctggtcggacggtcttctgctgcgcccgctggctcccgccgtgcccctgcctgattccgtctttccggatgctctgaacgagaaccgcctgtaccgggtaatcgcccctttgcccggtcaaagcgccgccgtggtggtgtacaacctcaaacatccttccccggcggaaccggtacgggggaaaatttccctggaggattataaaaacgcggcggctctgctgaatggcaatgcggcggaagcctacgcctctctcccggcggagggcatcgccgcctattccgcagaggaaggccgcgcgctgactccggcacagccggatctggatgtagagctgacgggattcaaggaccgcctgttcatcatggcccctatcgtccaaggctgggccgtcatcggcaggagggacaaatttctctcgccctgcgccttggtttccgctccggggtacagggagaacggcctccgcttccgcgtgaaggaatccgggcctgtcgtcatctggcggggaaaaggcccggtcaaagcgggaaacacccccgtcaggaatctggggaacgggttttatgaattgcaatttcccgtctccgaccaccccctggacatcactgtaacagcggaataactccggacatttcctctcatttttcctacttcgtctcccatgaacccgcttcatcccctccttgctttctctctgttgcttccgctctgcaggcattccatggcttccgacgcagctccgactgccattcccgcgccgaaatccgaggctccaaggcaggcgattgaacaattcctggggcttaccgccatctggatgctggaaatggaatggacccacgcctatgccaataaaacgcccaaggcggaggatttccggaatgccatgctggcggcgggccttcagcaatgccccgcggactttcaggaagcatggctgcggcaaacggccaggccgggccgcaattatgcggctcatcggggcaacgaaaaaagaaaaccgccacaatcatcacggtgactgtaacggtttgtttgtgtgcttggtgtagcagttccattccgtgcagggtgacacggaaattacgccgtgcggaaattccttagatcattaaggcattttccgagccatattgacaagccaactctgaaaatatccaaaatgagccaaagaagataccccctttgggaaccccttactccctcattattccatcatctccgatatgaatatggaaacgacatattcggcgatttcgcaatcctgcgcttcagtacccccaccaacgccgattgctcctacaatctttccgttgacaaaaagaggatagcctccggaaacgagagttatgcgagggtcgttggtctgtattgccataagcggctgcccttcggctgcgtattttgccacatcctttgtcgtgcattgggtcacggcagacgtataggctttgcccggtacaagtgttgtgcttagcacaagtgcgtcactgaaacgacggaacactcttggcaagccgctcggatcggctattgcaaaactgatttcaacgcccagttcctgacttttctcgcgtgcggctgcacacaggcggtcgcataggtcatcggaaaggactcccgactgagtgatgggattttttgctgtcattgtggtaaagattgcaagcagcatgaatgctgcggttaatattgctctaatgcaccgcaaaattaccaacaatgcgtgtaatccacaatgagtgacaattttatcaccgtatgataattttatcacctcgccggaatttgttaattttgcaactaaatgaccgggaacagccatgtatgagcataagataccaccgatagacctcgattgcggcgttaccatgaccctccatgtgattggagggaaatggaagccatacctcattaactgcattaccaaaggatttcaccaacctaaggaatttcagaaaataatcaccggagccacaaagagggttcttgtgaaacaactcggagaactcgagattgccggagtggtgcgaaaagtcacctatgacacagtgccaatgaaaaccgaatacttcctgaccgaattgggagaatcccttgtgcctattatccgaatgattgacaaatggggtttggaacataaagccctgttcaatgaaatgggattgctcagcaatgcacaatttgtcacgaatgagccaaaggaatcgaccctttgaaaacccttgcaaccataaacaaggctgtttgcttgataagccaattgtgtaagttcacaccaaaatattaactttgtattactcaaataaaatctcttatggaaaataatattcagaaaagccagaatagaggagatggaggagatctataatctctatgtggaacgcataaagtggatggacgaaaatggaattagaggatggaataccaccaattatcttgcaagatatccattaatcatattaccgtagaaggattgagtcagaccaattgtatgtgctgcgtgaagttgggtcaggcaaactgatgtgtgcagtagttcttttggatactgacgagcgttggaatggcaaacccgatataccggcatactatgttcataatctcggcacaaagcccggaataaaaggagcaattggcaaaaaaatggcaaacatagcatacggcttgattgctcaatacatagttccatactaaacaattactatgctttacacggatacgagaatgttggtatgtgctacgacaaaccttatgagggatatttgcgtgaaaaactcctgtaacatattccaagagtgattttatttttgttgttataattgtagcgatagaatttgaatcatattacatcacaaaaccgattgagccgaggcggttgacagcctccatcttctgcttgtcaaggacgcgcaggtatttctcggtggtggatattccgcaatgccccatgagggtcttcagccgcctacgccgcagatgtaggacgccttccaccgggacatgcgggaaatccgggaaaacatgctgggaggcagataggaaacagcctttttgcatgcaacgccttccgggaaccttcccggatatcaggccaaggtcaccccagcagcccggtgtccattccttcgttatattcccaaattccctgctccaccataaacgcgctccagctattgagcagttgttcaaaataggcggcattcacattgaaatggtaaaatgtgtggtccgccacgtccagaagttcaaatcgggaacggttcttcttttttctccacagctccgccagcctctcgctgttgcgccacggcagaagcctgtcccttcctccatgactcgcaaacaggggaggcagccccctctgcacgcgccgcagggggttgacggcatcccgctggtccggaggcatcatgccgcccagcttaaaagcggattgcgccgtcaggtcgcacacgcctcggaacagggccacggcggcggggccgggaggaaggggagcctttttgcggaacagggaccagcgggcgggatgatccggaagggccacatgcagagccatcagccctccggcatcacttcccgccacagtaatgcgggccggatccagccccagcaaagcggcgttcccatgcagccaggcccaggcttccctgccctcttccagaatgtccatcggctccacttcataatcgccgcgtgtgcggaacatgggtataatgcctgcaataccctgctgggcaagatagagcgcccacggcacaaaatcccccaggctcttgcccacccacatgccgccgtggaaaaagagcacggaaggagcggcggcttccgcccggtggccggggggaaaaaaaacatacgccatcagctcctctccgtctgaaaaccgcctccacacaaagccgggctgctcccgcaacagtttcctgtaccgggcttccgccaaatgatcggcttccgtgaacaattccataagaacggcttcatgatgcaattgtgttgcactccgcgcaagtttgatgtctaaataatcgtgtaatgactttccgttccattttctccctggcctgctgcgccgcagcccttctttctcccgcttccgcagccccccgccccggagacgccaaactgagagacgacctggacgtggcttacaatacatggcgtctgcatctgctgcgcggcaattatgacggctggagagccacaacctccgtctaccgccaggtgaaagtgcgcaatctggccgtctcggaaaaacgcccctttcccgcctccctgttccggcagcccatggctcctcctgcgctcgctccgctgatgtacgtaggttccgtcgtaaacggccccacggccgcagccacctactacggcaaggtggatctggggctgggccaggaacccacggattcgaacgctctagtgctgctgttcactcatgaaaacggcaaatggaaatatgaccaggcgcgctttttcaacctcacccgcctgcccgccgtcaaagaacgcctcaaacgcggagacgcctccgtgctgatggagcaggacgggttccagccccttgggaaaattcccgccgtgccgcctgtctgcccgccgcccaaatacatcgcaaaaattctggtggactgccccggccgcaccgtccaggcgaacgtaaacaatatttccctgcatgaatttgacaacacccgcctggcggaagtcatttccggaggactgagggacgggaccaactcactcacactgaacttttccgacagcccgaacggcaaaaaaggcgccgtactcgtggaagtgtacatcatgccggaaatcccgggccacctgcccgccagggctttttcctacttcgtccccccccaggcgcaacccaaaagcggccctgtgctgattaacgtcactccggaattgctgaagaccatggagcctaagaattcttccccgaaggcagccgccagcaaataaaatcgtcattcttcaacgtttccgttgcgggcccggtcataccgccatatgacaactcaacctcaagtcagcagctccgcggtatccggcaactcatggtggatgggcatccttggcgtcatcgagctatttcttggcttcatcgccctggcctctccctggatcgtcggagccagcttcatttgggtaatcggcatcatgctgatggttctggccgtcgtccggctgatccaggtcttcaccgtcccttcctcccgtgggtggaacctggtgacggccatcctgtacggcatcgcaagctggtttctgttccgggaccccaatatttccctggctatcaccacgctcatcatcgggtggggcctggttattgccgccgtatttcagggagccatctggcttcaaacccgttccctgcctgccagcgggtggcggctgttcaacgtgatcatcacgctgatcctgggcctcatggtcatcttcggctggcctgaatccacggcctggttcgtaggtactctgatcgcagtggaactgatcttctccgggtggacgctgctcctgtatgcattcagcggcaattccgcccgccgttaatcccagtgacaacaatgaccctcacccaggaagaaaccgaacggtacgccaggcatctttcccttccggaactgggagaacagggccaatacaaactcaaacgggcgcatgtcgccctgacgggcctcggggggcttggctccccggcggccctttatcttgctgccgcaggcgtggggcgcctgaccctgattgacccggacgaggtgtgtctttccaacctccagcggcaaatcctgcatgccacggatgcggcgggcacggctaaaaccgccagtgccgccagacgcctgtacgccctgaacccctccgtacgcatcaacacggtccacaggcgccttacgccggaaaatgccgtttccctgctggaagggtgcgacctggttctggacgcttcagacaattacgcggcacgcttcgccatggcggatgccgcctgcaccctgcgcattccgctggtgtacggcgccgtgaagggctttatcgggcaggtggccgttttcgccccccatcagggaaccgcctgttaccgctgcctcttcccggcagatacgcccatgcaggaaaaagacaccgcctccgccgcaggcattctgggtgcgcatgcgggcatcatcggctgcatccaggccatggaagccctgaaatatcttgcgggcattccctctccgctggtgggcgccatgctctctgcggacacgcggcgcatgcgcttcaccaccatccctctggcgcctaatcccgcgtgcagatgccggactaacgaggggtgcggagccgcaatgaaaaattgacggcgacggcggcatctggcatcatttccggcaggtatgaatcatttaacacgcgccaaatccgtttttgaaatggagattgaagagctgcgcggcgtcctgtcccggctggacgacaatttcaacaaggctgtggacctcatgtcccaggctctggaccgcggcaacaagatcgtcattgtaggcgtaggcaaatccggcaacatcggggccaagatcgtcgctaccctgaactctacgggaacgcccaccgttttgctggattccctgaacgccctgcacggggatctgggcatcgtccaggacggggacgtctgcattgccatgtctttctccggagaaacttcggagctgctgaccctgctccccttcatcaagcgttttgaactgcccatcatttccatgacgggcaacacgggctcatccctggccaaatactcggatatcgttctggacacaggcgtttcccgggaagcctgcccgctgaacctggcccctacttccagcaccacggccatgctcgtcatgggagacgccctcgccatggccctggtggaagcgcgccacttcaccgcgcgggatttcgccaaacgccaccccggcggttcgctggggcgtgccctgctcacccgggtgagcgatatcatgcgccgtggagaagaaatggccatgcttccggaaaccgcctccgtgaacgactgcctgaaggcgatgaccacagcccacgccggcgcctgcgtcctgctgacggaggaccgcaagctggccagcatcttcacccacggagactttgtccgggcatacggggcgaaccctctcatcggagaacagcccgtcagcgggttcatgacccgcaatcccatttatgtcatggaagacgacctggccgctgaagcggcgaaagccgtgagcaaccgccatattgacgatctggtggtgctcaacgcggaaatggcccccgtgggcatcattgacctccaggaccttgccaggctgaaactggtttaaaccctccctttcccattcttttcaggcatccgtgattcaaaagtaacaaatcaatcacggatgcctttttcattgaacggaagcttccgtttccacaatcttattttcataaacatgttcctgaaatttaccaccgccctgcttgcctgcacctggggcttttcctgcgcacaggacatctccggcccggaggaagataccaatgcccccgctgcggaggaagccacgcgggaagtccctcttccggacgggaaaacggttcccaaatttgaacccctggatgagcaccgcatcaaaatcggcaatgtgattgtcaaccataaggagcgcaccgtcagttttcaggctcaagtcaacatgaaggaaggaattctggaatacgtctgctgcatgcccaacggcaagctgcatgaatccctgctggtgacggaggcggatcccctgcacatcagcctgggaatgacgctgctcaaattccaccgctttgaaaaatttttcccggtgcgggatgaaaattttgaatggcttcccttcacggaacccaagccggaggactacgcagactcctacgtgcagattgtcatgacctatacggaaaacggcagggaacagaagagcgatttttccgacatcgtcgtgaactcacaaacgcggaagggactgaatcccagcgactggctttacaccaattccttcttttacgaaggcgcctaccaggccagcctgagcggagaagtaatctccatcttcgccagccgcacctcccccatcaattacatcggagacttccatgacggcgtcaacgatacaggctggatcgtcaacccccaaaaaaacctgcctctgggcacaaacgtcactgtcaccatttcccagaaaccggttcaacccaagcaatagcatcctatgttcaaatccgtactttcactaacgctggccgccgcactgggtacagcctccttcgggcagaccaccctgacggccattcccggagaagcggcagccgctaaatacgcctccattagccaggaaattctgcgtgccattgaaaaagggaacgaatacctgaaaagcaaacaaaatccggaaggttactgggcccagccgtcctaccctgccctgacagccctggcggtcaccgcctacatgcgggaccccgccaaccaggggaaacccgtcccggaatacatccggaaggggtatgacttcatcctgaaatcccagaaggaagacggctccattttcaaccgcggcatgtcctcctacaatactgccgtgtgcatgatggccctgctggccgccaacaaggaggaatatgcccccgccattctcaagggccgcgcctacctcatcaagcagcagaaccactttgccccggacaacccttataacggcggcatcggctacggcgacaagcaggctcctcccattgcagacctctccaatacctccctggcgctggaagccatttactactcccagaaactcgccaaagacggcaagtacggtgaacagccggatctggactggaacgccgccacggaattcatcaaccgttgccagcaaaaccctgccgtaaacaaggaaccctgggtttccaatgacaaatcccagctcggcggcttcgtgtaccgtcccggcgtctccagcgccagggacaaaaaaagcgccgcctttgacaaagcggagccccccaaagcttacggcagcatgacgtatgcgggcatgcagtcccttatttacgccaatgtggataaaaacgacccccgcgtcaagctggccctcaagtggctggaaaacagctacagcctggacgaaaaccccggcatgggcgttcaggggctttactactactatcaggctatgtccaaggcgctcagcgccatgggaatagataccctgacgctggaaaacggccgcaaggtggactggcgggatgaactggccaacaagctcatttccatccagaagagcgacggttcctgggtgaacaccaacaaccgctggtgggaggcggaccccgtcctggtgacctcctactgcgtgctggcgctggaacagctctaccactccattccccggtaacggactgccatgctgatttcccgggccggaaggggaggcaatgacctccttttccgtacccggaaatgaacgccccatgaaatagaagggtcttttcttcaatcacttcaaattcatggacaccattgattccattaccattattgcagcggcatggggcctgctggttctccggctgacgctggcttttatcctgtggccgcacgggacccagaaagtgctgggctggttcgggggcgcgggctgggagggcacctaccgggccttcacggaaaaaatgggcatcccccccttcctggccaaggtggccatgctgacggaatttttcgcccctatctgtctggtactgggcgtattcaccagaatagcggctctcagcgttatcatcctcatggccgtagccataaccaaacacgtcaaaaacggctacttctccaactggtccggcaaaaaagccggggaaggcgtagaattccacctgctttatgcgggctccgctttcgccctgttcctgacaggccccggcccttggtccgtggacgcctggtgcatgaacatcgtgcatgtcatctttggttgacggcggcagacagcacacggaagggcatagaacatactttccgattctcaaacccgccgtattctggtatttatggaaaggctttcttttgcctcgttaaccctttccgtcatgaccagccataaacgcttaaaactccggcagtgcaccaactgcgaatgcgtcattaacggagtatgggaatgggtggaagaatgcgcccgcgacgcagcggcggaagaacccgccatgcgcggtattctggatgacgtctgcctgtctcgcaattccctggccacttccatctcggcgcggctggcccgcaagctctcccgccgtgacatgccgcgggagctgattgagccccttatccgggaagcattgacggaagaccagaacatcctcagccaaatcgcccaggacctgatcgccatcgtggaccgggatcccgcctgccgtacgccgctggaacccctgcttttttacaagggattccacgccatcaccacgtaccgcatctcccactggctgtggcagcatgaccggacaatcatggcccttcagttccagagcctggccagtgaagtatttgcggtggacatccatccggcggccaccatcggctgcggcatcctgctggaccacgccaccagtttcgtggtaggggaaaccgccatcatccgggacaacgtctccatcctgcatgaagtcacgctgggcggcacgggcaaggaagaaggggaccgccatcccatcgtggaatccggagttcttatcggcgcgggggctaaaatactggggcgcgtcaccattggcgcctgcgccaaaatcgcagccagctccgtcgttctggaaaatgtcccccctcataccacggtagcgggcgtacccgccgttatcgtcaacgattccattccggacaatcccgcgctggacatgaaccagtgcctttgcgactgaaccggcaacagattgggaagccatcacttacggcagaaaacaggttgaatccgcaactccgccaaaatcagcggaaaaggcaagccttaaaaagaccggacttgatacaatagtttcaaccccaacgcgcctgtatttataaatcctgatttttaatacttgaagcaaatccgaatcctaattggccaatctgacgggccgcgcctgttcaggcacggctttcccccggaattcgggacggctccttcagctgcccgtttccttcaataacatacttgtaggaagtcagttcgcgcagggccatgggaccccgggcatgaaacttgtccgtgccgatgcctatctccgccccgaagccgaattcctccccgtcgctgaaccgcgtggagcaattatggtaaacgcaggcgctgtccacccggttcataaaataatcgcgtgcccgtttatcctccgtaatgatggaatcactgtggtgggacccgtagcggttaatgtgttccacggcatcccggacgccgtccaccaccttgacggacaaaatgaggtcttcatattccgtggaccaatccctttcttccgccggaacggcctcctgaccaaaaaacgggcggctccgttcacacacgcggcattccacgccacgcatgcgcatgcgttccgccgccataggcaaaaaccgctctgccgcggcagcatccaccagcagggtttccaccgcgttacaaacgccgggcctctgcgttttggcatcgtccagcacgttcacggccatctctaaatccgccgccgcatccacatacacatggcaaatgccgtccagatgtttcaacacgggaactttggagaattccgtcacggcgcggatcaaccctttccctcccctgggaataattacattcaagcaggaatccagctcgcacaactgccgcacctcatcccggctgccggaatccagaagccgcacggcatccgcgggaacagcggatttctccagcgcgctgcgaagagtctccgccagcacccggttggtccgcagggactcgctcccgccgcgcagaatgacggcattcccggacttcaggcacaaggcggcggcatcgcaggtgacggtccctcggctctcataaataaagccaatgacccccaggggaacgcgcacctggcggatacgcaggccgttggggcgtgtccattcccggatgcactctcccacggggtcgggaagggctgctacctgctctatgccgcaggccatgtgttctacccggtccggcgtcagcagaagcctgtccagaaacgcggaattccggccactcttccgggcctcttccatatcaaggacattctcccggataattttctctgcggcgttccgcactcctgcggccatcagccgcaaggcctgagccttctcttccggctccagggcaagcatctcccgtgaagccgccagagcggcccgccccgccggttcaagaggattttccatcttcatgacttcctcctttcggcacaaaatacgttccggctccttcctcccttccctccagcagcagcgcaatgcgttccggatggcggccatgcagcatgtaaacgcccgttcccgcattcacggcttcccgtatagcctgcaatttggcgcccatgcctcccatggaaaagcggccccggtcctcctcagcgaatgccagtacggcatccacatcctccacccgggaaatgatggcctcccgccttcctccggggggatacaggccgtccacgctcgtcaggataaacagagcgtcggcctccaccaggcgggccatatgcacggacagaatatcgttgtccccaaacttcagctcctccacggatacggtatcattctcattgacaattgggataatgcctccgtgctcaaacaggcgcaacaccgtggcctgcacgttgcggcggcggagtttcaaatcctccgccgtcagcaggagctgggccacatccacgttaaagtggttgaaaagattctcatatgcctgcatcagccgcgtctgccccacggccgcgcacgcctgtttcaaggacagttcctgaggataggacggaagccccaggacggacacgcaagcccctacagcgccggagctgaccagaaccacctggtggccctgctgcatgagtccagccaggacgctcaccaaatgcacaatggaagaaccgtccaatgtcccattctcacgggttaacacgcccgtacctactttaattacgattttcatgtatctccgccattcatgatacaacaatccctttttccacagaaagcagaaaacgcgtcctttccgcgctaacccgtgaaagcgcaggccgtaaaaaacggaaggaattccccctttttcctccataaagataaaaaagataattccctccgcccgaccggctccggcgcggataaaatccgccatcccggccaatatctggacagccatgaaaaccaggggaggacaacaccggggaaaaggactggagcaggccgtgcgacatgtttccccccggctttattccctaaagctccatgcatgccggtgagcgtgccgcaaaaccgggaacggcatgcgcggcgcttccatcttcaatgcttttccccggtccggaactggtgccggagacgcattttaggcttccaatatgaagctgatccgctcatattgcccgggcatgaatcttgaccttctccaaaaagccgccaaccaggcgcggggactcgccatggatgccgttcacgactgtgcatccggccacctgggcctgccgctggggtgcgccgaaatcggggccgtcctgttcggcgatttgctcaacatctgcccttcgcagccccgctggctcaaccgtgaccgcttcattctttccgccggacacggctccatgtttctttacggctggctccacctgtcaggattcaacatcggcattgaagatatcaaaaatttccgccgcaaaggttccatcacgcccggccacccggaattccgggatacggagggtgtagaatgcaccacgggaccgttgggccagggcattgcgaacgccgtaggcttcgccctctccgccaggcgcgcggctgcccggttcaacaggcccggcatggatatcttcacccagcacgtcttctgcctcacgggagacggctgcctgcaggaaggcgtcgcccgggaatccctcgccctggccgccgtgctcaagctggataaccttattctcatttacgattccaacgacatcacgctggacgctcccgcggaacgtacccagctcacggatccgcgcgccgtatacgaagccctgggttgggatgtgcgccagattgacgggcacgacatcagggccattgagtctgcggttgaagccgccaaaaacgccaaaaacaggaaaccccagctcatcattgccaaaacggtcatcggcaagggcattcccggcattgaaggcaccacaaaaggccatggggaaggcggagccaagcttcaggaagaagcgcacgccaactggggaattcccgccggagaacgctattacgtctccgaagacgtccgtaccgctttcgcagacctgaaagcccaacgagaaaaagatttcaatgcctggaacgccatgtacgaacaatggcgccgggcttatccggaactggcagaggaactggacgcaggcatcaacgcctgctcctgcggcgtcaatccggcagactcggacaaggcaataccgcccttcccgcaggactatggcgatgctacccgttcggccggagccgttgccatcaacgccatcgctaaagcgaatccctgcttcctgaccaccagcgcagacctttacagctccaataaaaactacctttccggcgcaggagacttctctgcggaaaccccggaagggcgcaacttctggttcggcatccgcgaacacgccatggccgccatctgcaacggcattgcctacgacggcctgttccgcgtaagcgccgccactttctgcgtcttcgtagactacatgcgcgcctccatccgtgtagccgccctcagcggactccccgtcacctatattctgacgcatgactccgtagccgtgggagaagacggccccacccaccagccggtggaaacaatttccggcctccgtgtcattccgaacctggatgtcatccgcccggcggacccggaagaaaccgcaggagcctggatggccgccatgcagcgtgccgacggccctaccgccctcatcctgacccgtcagaaagtggctacgctgaacggaatccccgttgaaacgcgccgggaaggcgtgctgaaaggcgcctacatcgcccggaaagaacagggagccttgaaagccattattcttgccagcggttccgaactggaattggctctgaaagcggcggaaaaaataggggaaggaatccgggtcgtctccatgccaagcttctgccgctttgacgcgcagcctgccgaataccgggaaagcgtgcttccctcctcctgcatgaggagagtttccgtagaagccggagtcacggacctctggtggaaatatctgggctgccagggggaagccgtgggcatcaaccgtttcggcttctccgctcccggaacacaggtgctggaagaactcggcatgaatgtggacaacgtcgttgccgccgtccacaaggttctggccaaataaacagggaatatttcccctcatctcctttcaggggctgttccgcatccgccgggacagcccctttttcatgcctccccggttgccaggaaaaaggcaaggccgttttcacgaaacaccagtatccgtaacgcaggaactatatcctttcctgtgaaaattccgttcgttttccgtccggatttctctaaatacaagacctccgcacatcagctccattgtccgaaccggacccggatgggactcaggccgcaaaagccccggttgcaagcagcccgttttcatctcagctgccggaacggataatttcaggtttccttcatggcgccgataaatatgcggggcggccatgatcaagcgccgcctctatcgacgatgcgatgaaccctaaacccgcaaaataacgagggtccggcccatcaacaatgaaaaaccgcccctttccgaaaaaaggggcggttttaaagaccttggcgacaagggaagcggctcctttagaaagcggcttcaatcttcgtaatggtatacacctttttcttgtcgccgtccatcgggacaatcttcacctggtcccctacacttttgcccgtcagctccttgccgacctgggaaagataggagacgatatgcttttccggatttgtgtcccacgcgcccagaatggtgtacaccacgggctccccgccattcaacggctgaagagtcaccttcgttcccatggcggcgcgggaggtatccgttacggcaaagtccgtgccgcgggccagggccagcgcatgttccagttccgcccggcggcggttaagcaccttctccacttccttggcatcctggtagccgccgttttcgcggagatccccctccgcacgggaaatcttcttgttatgcaggttttccggaattttcacgtttaccagttcttccagctccttcttgcgggcctccaggctttcccaggaaacgaaaatcggttccggtttgtcggagttgtccaccagggcgtccagcacaatggagtgcaggtccgggaatacgctgatgatgcgggccatcagcgcgccgcggtcctgttcggagaaagcggaggtgttgtacagcatcttggcaaactggcggacttccgccacatcctgccccttgatcatttcctggatgatgctcttatcctccatgaacaggttcttcaggcgcagcatgcggttggggccgccgtccatgtggtcctgttcaatcagggaaagcatcgcaatgcccacagggaggccaaaaagaggcttggaagcgtcatgccgctggcggcatatccagatgagggactccgccggaagggtctggcgcagcaattcatgcttcaaatgcttgaccagcaccttgtcctgcccttcttctatcaggaatttggcgatttcccccacggcgcgggcgccgcctgcatcaaaaagctccagcgccttctgcggccaatcctccccaaagatggcgggcagcgtggcatacacgcgcttctgccgcacggcaggcatggaattgagcacttccgcgaagcggcccacatcgccgatattggcttccacgatggaacgaaggggataagcttccttggccgcctccgtatttttaagggaggcaatcaggtcatccctgagcacggccagctccagcacctgctggagagccaggctgccgccgttgcgcacatcagcatccacggcacgaatcagggcattgacggcatccggctctgccatgaccgcttccattttgatgccgtccagcacgcgcaccttggctttcaggtcggcggccttattgtaatcttccagagccgcctgcgcacgggaaaggatattcgcgcgaagcgtgatgcgttcgcccttgcgggtgggcatcatgaactggacattggaacggagcatggcgcgcaccttgtcccaccagcctttccacttgtccgccgcaattacggtgcctttcagcgcggcttccagcttctctggagtaagggaattaccgtagccctgcaaggtaacgcgcaccagttccaccgggtcatccacggacaggttgatcagggattcggtatcttcataccgcttggccaggaaatggtcgtcactgatgaactccaaaattctgggagcgaattccagggcaacttcgtgttccggattttcctcaaaatcaatgaccagctttttggcggggagattccaggaaatgacttttccggcgccccaggaagcatggaagcagtaacggccaggtgcgatgcgatcaagtttttcggcgagagagggggtaattttccccagagacaataatttctccaagtcggcgtgcatactaaagcacatgatacgcccccccctaccggtatcaagactaatttccctcttccgtccggaggcgtcccgaacggctttccaaagccgccacggagacagcggccgtccgcgtcatgctccgacttcacattcgggtttcgcttctttttccctcccctcctccatccagttgcggcttgaccgtgcggggcgtctggcgtaacatctccgcacgcattcaacccctgcgcaacacgtatcatggaacctatttacgaagggaaggccaaacgcctttatacgactgacaatcccaacgtcctccgcatggaatacaaggacgacgccactgccggaaacggagccaagaaggcccagtttgaaaacaagggcaggatgaacaaggccatcaccctggtcatctaccgcatgctggaaagcaagggcgtgaaaacccacctggttgcggacgtggacgacatcaacattgacgtaaaaaaggtttccatccttcctctggaagtgatcgtgcgcaacatcgccgccggctccttcagccgccgcatgggcgtcaaggaaggcacccccttcaagaagccgatcgtggaattctcctacaaggacgacagcctgggcgaccccttcattaatgatgactacgcccgggaaatgaacgccgctacggaagaggaatgcgtcttcctgaagaatcaggcccgcatcgtgaatgacgtgctgattgactttttcaaacaggtcggccttacactggtggacttcaaaatcgagttcggacgcttggcggaagatccctcccaaatcgtgctggcagatgaaatttccccggatacctgccgtctgtgggacatcaagaccggcgagaagatggacaaggaccgcttccgccaggacctcggcaacgtgatggaagcctacgaagaagtcctttcccggctccagaacaaggcttgagcctcttcccccttcccatgggagccggtcttccgccggcccccatttttcattttaccacactcttgagcgatatgaccctccactttgaagttatcagccggttccaggccgccgccaatgcggacgccctgctctatacccccctgaacgccagcctcactttccgccgcagccgcgtttacactgtagaaatcaccggggacgaacaaaaagcccgcgaatacctcctgagtgtgctggtggaccccatttcccaggaatgcacggaacagaacgcgcccatcctggaaggcgccctgttcacgattgactacggcatgaaagcaagcgccctggatctggaaaaagaagccatcctgcaaaactaccgcgggcgccggaatatgggctttactatggacggcctgaaaatcacccagcgcgtgtacgtcttcggccagggagacaaggaaacgctggcggcgcgctttgccaaggacgtctgcaatcccgccattcacaactggaccatcgcctaacccttttcctttcccatccacatgtccgccaaaacctaccgaaccgttcccgtaaggaacctgagcagcgacgaactgcttgaactcagcaagaaacagaagctttccctgtcccgtgaagacatggaagtcgtccagcagattttccgggaaatcgaccgcgaccccactgacgtggagttggaagtaatcgcccagacgtggtcggaacactgcaaacaccgcatcttctccgcctctatcagccacagcgtcaacggcggcgcaccggagacggtgaacagcctgttcaagacctacatcaagaagccttccgaaaagatcatggaacgcaaaccgggcttcgtgctcagcgcgtttgacgacaatgccggcttcatcgccctggacgacaacctggccgtctgcctgaaggcggaaacgcacaaccacccctccgccattgaaccgtacgcgggagccaacaccgggctgggcggcgttatccgcgacatcctgggtgcaggcaagggagccaagcccatcgcctccctggacgtcttctgcttcggcgctccggacacgaatccggcagacatcaccgccccggacgtcatccaccccctgggcatcatgcgcggcgtggtgcgcggcgtgcgcgactacggcaaccgcatgggcattcccaccgtcaacggcgccatccagtttgaccccacgtacatttataaccccctcgtcttctgcggcaccgcaggcgtgattccgcgcggcgacatcctgaaggaaatgcgtcccggcctcaaggtcatcgtcatcggcgggcgcacgggacgggacggcctcaagggagccacgttctcttccgccgctctggatgaagcctcccatgaggaagacttcaccgccgtgcaaatcggtaacccgattgaagagaagaaaacgctggacttcattctggaagcgcgcgaacgcggcctcatcgtctttattacggactgcggcgccggcggcttctcttccgccgccggggaaatgctctccgtcacgggcggtgaaattttcctggacaacgcccctctcaaggaaccgggcctcatctcctgggaaatcttcctgtcggaatcccaggaacgcatggttatggccgtggaggaaaaagaccttccggaactccggaagctggcagacaccttccagacggaactgaccgtcctgggccattccgacgatacgggaatcctgaaggtctggcacaagggggaactcgtctgctgcctggacaactccaagctgcatgacgcccccatcaagaagctggaatccgtattcactcccggcaaggcgctcacgggccagcccctcccggacaaggatctgaacaaatccctggaaaccgttatgggggatttcgccatcgtttcccgggaacccatcatccgcgagtatgaccacgaggtgcagggcaacaccatcctgaagcccctggcgggcgcccaggcggacgctccgcaggacggctccgtggtggacatcgacggctcggacaaatgcatggccatggcttgcgccattcttccggaatggggcaaaacggatccctacgccatgggtaccggcaccgtggatgaatgtgtgcgccagctcatcctggttggctccaacccggacaaaatcggcctgctggacaacttctgcatgggcaatccggaagatccggcggaactcggccgcctggtggaatgcgtgaaagccatcgccaaggcggcggacgcgtacaatgcccccttcatttccggcaaggactccttctacaactattttgaaacggaagacggccccatcaacgtgcctgtcaccttcctctgctccggctttggtgtggtggaaaacccggaccacgtcatcggttcttccctgaggcggagcaacagcctgctgtacctcatcggccatacggaagatgaaatgggcggttccgtcttcgcccgcacccacggggtggaagacggcaaggttccccagacggactgcgccgcgaacatggagctgtacaaagcctactacagcgccctgacttccggtctggtgctctccgcccatgacgtttccgaaggcggcctggccgtcacggcggcggaaatggccttttccggcaagggaggcgttcggctggctctcacgaaagtaccgaccgtcaacggctggaaatcccccgcagtgcctctgttcagtgaaagcacgggccgcatccttgtggaggtggatccggaattcgccgcggattttgaaacggctatggacggcttcccctgcgcctgcatcggcggtgttacggaggaaaagcgtctcacggccacctgctgcggcggagaaaaggtgctggattgcgacatagccaacctcaaaaaactctggaaggacggacttaccccctattattgacctcctgaaaccggcatcttatcaaaccatcgatttatttctaccaatatgcctcacgcacttttactgaaataccccggcaccaactgcgatgtggaaacggaacgcgccctgcgcgcggcagggttctccacccagatccagcccatcgccacggctacgccggaacacgtcgcaaaatcccagcttgtcgtcctgggcggcggcttcagctacggagactacgtcaccagcggccgcctggcccagttggaaacggaacgcttcctgggagatgccctgcagcggcaccatgccggaggaggcatgctcctgggcatctgcaacgggttccagattctcaccaagctgggcattcttcccgactccagcctgattgacaacaaaaaggaacgctttgaatgcgtctgggccaaactggtgaaagtagccaggaactctcccttccttcaaggcctgccggatgaattcgaactgccctccgcccatgcggaagggcgcctggtcacccgtcccggagatgcggaaaaatacctggcttccgggaatgtggctctccagtacgtagacaaccgcgacggctgcgaatgcagtatcgccggcctccaggattccaccgggcgcgccatgggtctgatgccccatccggaacgctttctgctgccccgccaccactatgacaaggactgggccggcaacgaagactggggctgggggtacttcctcttcaaatccgcctttgacgccctgaaataaaggtccatttcccattaaccgctccccccgcattcattccatgacagatacggccctcatcggttcttcttgcgccctcggcgttttctggtcctcaaaaaggtactttgactacctgattgatgaaaccaacctgtccctgctgcgcggcaaggaattcgggcaggccgtcattatctgtccctccctccgggaagggagcacggccattcgggggaatacggctccctttctggctcaggttaaaaccctgattgatctcctgcatgaggtgaaggcggaacgggtgacctacatcaccagcattgacacccagccggaaacgggaaatgaactttctcccttgctccgagaaacggaggacgaatggctggcggctctggtagagctgaaagacttcatcaacctccggttcggccgcgtgctgaacgtttaccttccagaagtcaccggaacgggagcaggcatgagtgtggcggatctgctggcagcagttccggaagggacggaagagctggacgtagccctgctggaacgccaccagctttatcccatgcaccgcctggtcagggatgtggaaaaagcatgggagtgcggcatcttttccgtgaatctggtgccggaacccgtcacggcctttgaactggtggagcagtgcttcccttccctggtcaaccgcctccccgtcgcgaaggaaacggacccgtacgggagcgccagaacatccgtttactccacgcagtaccacgatccggacaccggttatatcatggacaagcaggacgtcctggcggggctctctccggacaaacagtcctagcccccggtcagcccccgtctgcgccctgtgcagtcggggctttttatcccccaccttcaaaaaagctcccccgcaggagccgtgctttcctgttgagcgcattccggaacggtgctatacaaaagccatgaagattagcgacgacagccttgaattcttaacggaacttctggaaacccccagcccttccggctttgaaatagatgcccagcgcatctgggcggacgaactgcgcaaatatacggaagacgtccagtgcgacacttacggcaatacctgggccgtcttccacgcggacgcggaagaagcccccacattgatgattgaagcccacgcggatgaaatcggcttcatgatccgccatatcaccaaggacggcttcctgtatgtggaacgcgtaggcggcacggatacggccatcgcacgggggcgccgcgtgcgcttcctgggttcccagggagaagtgatgggggtgaccggaaacacggccatccatttgcgggaacccggagagaaggaacccaaaatctgggaaatttacgttgatgtaggtgcctcctccgacaaggaagtagcggaactcggtttgcgcgtgggccatgtaggcgtttactgcgacggccccatgctgatgaatgaaaacaagctggtatgccgggctctggacaaccggctgagcggcttcatcctgtcggaaatagcccgcaagctgtgcaagctgaaaaagcccgtctcctggaacgtggtgctcgtcaatgccgtgcaggaagaagtgggctgcattggcgcgggaatgattacccaccgcctgcgcccggatgcggctatctgcatagacgtgactcatgccacggactcgcccggactggacaagggcaaatttggcgatatcaggcttggcggcggcccagcggtcatccacggcacggccaaccatcccaatctggtggcccgtctggaaatcgtggcggacaagaacaaaatacccctccagcatgaagccgccggacgtcgcaccggaacggatacggacagtatctacatctcccgcgacggcgtagcctccgcgctggtgtccgtccccctgcgctatatgcactccccggtggaaacggcctctctgacagatgtggaaaatacaatcaagctgctgctggaattggtcaaatccctgatgccgggagactctttcgggcacaagctgtaatacggcacggacggcagcattgctgacaaaatgaggacatgaaccgtcctgccggaggaaggcgcgcaaaggcgtcaatttcccccggcacgcccccatgcggcagcattcaggccgcatctcccctttgaagcaggggcggaactactccctgcaggcatcctgcgtcctcatacggtcattctccgcttcccggcggtgcttcctgttcaccggcccctggcttccttttccggaatattttcccggaaaccattacaggccggaaaccggccggaactctttctcccggtcacatttcactgaaatccagccgggatacattaaagtacgtttttcccttccggcaggaatcccacaggagaatcagcatgagggaaaagaggaccagtctccaagccacttcaaagggatagctggttaccaccctctccacaccgatgcagttgcaggaaagggaaagccccctggcccagccctggacgaacaacgccacgaacgtgaacgtaagcgcactgcccagcagcgcggccccggcgcaggttctgcggaacagaagccccaggccaaccgcaatctcacacgacactcccaggcaggccagaggatgcccccaggcctccgggaaaatggcgaaacggtcgatcgtctcctgaagctggtccagatgaagcagcttgcgcgccgcgacaaaaaggaaaaagccccccatccccagccggagcaggagcaaacagaaacggacgattttttcctttagcatcattggcgtattccgattattcgaagtgggtttgctgggcgcccactttttcattgcgcaacctgttcagttcatggcgcactttttccagctccatctgaagggatttctcccgttcggaggcaggagcctcggaggaagacggcgtaccggcaaccttcttcgcgctgcctgcggcgtcttccgtaaagagcattttcaatccgggagccttcgtgtcaaaccttatgacgccggaaacgggcttttgagaaccgggatgcttcacggaggctctcaccgtcaccgtgccgggtgttgaccccaggcgcaccagggccggagcggaaccccatttaacggactgggtcagcgtgccgtccggggaatccgtcagcagctcggcggggccttccacggaaaagacaatctcctcatcattcaggcgcttcactgttccgcggccatccgtaacctccgccaccacggcaaacacatcggaaccgttggcgcacaaatccactccatcttcccggtccagagtcaaccggattttctccgccctccgggccgggcggacttcatgcctggtcaccaccttgccgcctatcaggccttccgccaccagtttcaccgctccctccttgcctgctcgggcaagcttcttgttttccatgaaatcccaggctttagggaacacgacgggcacgcgcttgaggcctccgggacaggacgccaccttcttttccaccgggggtcctccgttgacactcaggcgaacggaatcacaattggaaaacaccgtcacgtcttccggagaaaagggagtgcattcattggcgatgtgcaccacagggccggaacccaacccgtttcgcgtcttctggggacgctgggacataaatgcgtaataggaggttttgggctgcctgaaagcatccagaataccgccgtagaagggatccggatggtaaccgcgctgatggtcgaaaggatgccacaggcagccgccgaaatgataggccggagcggcgttcagcgtatcgtacgtcgtatatgggaacgaggtcttgaggtagtgaagggcctgcaccatcatgggagcttcaccccagtgacgggctacacgggaggtggagttgtgggcggaccaggtatccacgttatcaccgaattcacgggtaaaatacggtttgctgttcttccgttccttgatggaccagtgtttgtcccccgtaaccgggtgggcatacagaacttcataatgctggctgccctgagccaccgcgtcgcaagcggtgtagcatcccttgtacggatattcctcatgcaccaggtcgcgggcctttttggcgaaatccgccgggtaatgagtttcattcaaaataggttcccacatcatcacggagggatggttcctgtcccggcgcaccatctggcggatatcgtcatacacccggtcagcaaaagggccgctgccccagaactgccagcccggcgtggcgacgatgacgaaaaggcccagacggtcgcaggcgtccatgaaagccggatcctgcggataatgggcgctccggatcacgcgcatgcctgccttcctcaatttcacggcatcctgccattgcaggttgttgggcactgcattcccaagccgggcaaaatcctggtgcctgttgccgccaatcagcttttcaggaaacagggatccattgagcaccagccccttttccgtaatttccaccgtccggacacccacccttatggaacggttgtccagcaaatgggccggatctttggaatggtcccctccaacagcgtcccatacttccacgctcaacgtgtacaaatcgggattgtccggagaccacggtttcacgttggaaagcacaagaggaatatccacttcacccgtggaatggggcggaatagtcagcggaaccgtctccccggcaggatccacccccttggggtccgtcatcaccgcctgcacgcgcaccttccgttccttgtctgcctggttggccacctgaaccttcacccccaccttgcccttgcgggtacggggatcaagaaattccgtccggaaaaaaactccccctccggccacagttccggcctcgttcgggtccgtgatatacacgggtccggtggaaatgaggtacacatcccggtaaataccgccaaaataggaaaaatccaggccttcctggggtttgccggggggataggaagcgtcgttggaattgtccgccttcacggcgatgacattcttttgtcccggtttcagccacttgtccagattgacaatcacgggaagatatccgccgaaatgctccgcggccttctccccattcacccagacctcgctctttcccatgatgccctcaaaatacagggtgtttctcctcccctccaaccgggagggaggaataaatgttttccggtaccataccggcccctggtagttggaacagccgctggcctcttccggaagaagctcaatgccgttggggaggttgacggactcccaggaggaatcgtcaacatccgggctggccgcttcctccggtgtcttctctcccttgaacagtttccagcccacattcatgccgtaaacgtcccttttcgttacgttttccggcaggcgaagagcccctgccacggaataggctcccgtagatgaagcggcctcctcctgatcggaaaccgcatcggcataaagggaaaaagagcttaccagacatgccgccgttatgagaatggtagtgactttcatcatggaataggggaatgcaaaattaatatacggagctcccccggcgccatctttcattcatataatacatccttgcgtataatgcaaatacatatgtcatccggcatcttccgcttgacctggaaggcatgttttttcatagtcgactcgccctgtacgggattatcccgcagccccggtccgagtgccaggttttcagtcccgtgaaaaggaaaaagcgaggcgttcctccaccggctgtctcagggctatgcctttatccactagttttttatgtcatctttctttcagaaaattgtcaaacttttctcctatgacattggcattgacctgggcaccgccaacaccctggtcaacgtcaaggaccagggcatcgttctgcgcgagccttcggtcgtcgccgtcaagggggacaaggttctggccgtgggagacgaagccaagcgcatgctgggccgaacacccggctccgtcacagccatccggccgttgaaggacggcgtcatcgccgatttctacatcacggaggaaatgctccgctacttcatcaaaaaagccacggccaggtactacctgattaagccgcgcgtgctcatcgccatcccctccggcattacggaagtggaacgcagggccgtcaaggaatccgcggaagcggccggagcccgccgcgtgcatctgattgaagaacccatggccgccgccatcggtgtgggccttccggttcaggaagctgcgggcaacatgattgtggacatcggcggcggtacgacggaagtggcgcttatttccctttccggcatcgtttacagccgttccgtccgctgcgccggggatgaactggacgatgccatcatctcctacatgaggagaacctacaatctcatggtcggggaacgtactgccgaagacatcaaaatccgtatcggctccgcctatcccctgcctcaggaactctctatcgaggtcaagggccgcgacctggttgcgggcctgcccaagacagtgacgattcgatcggaagaagtgcgtgaagcgctcacggaacagctcaacacgattgttgacgccgtgcggacgactttggaacgctgcccccctgaactggccgccgaccttgtggaccgggggattgttctggctggaggaggcgctctgctgcgcggtctggatcagctcctgcatgaacagacgggactgcccatccacattgcggaagaccctctgagcgctgttgcggaaggtaccgggaaagccctccaggaactggacttcttcactaatgttactgatgcggaagactaaagacggaatctccggagcaagcgctccggccttgcgtctgccgtactgccgcatcacatcaacgcaactgcctgcatgattcctttccggccatccctacagcttcaactccagccgctcctgacgggagacggcccaccggaaacattacgggcaatagcacaccctagcttattctcaccccgtgtttacaaaaatgcttaaaaaaatcaaacgggccttcggcttcggatcctgcgatcccatggaaggctccactatcatcatcaatgccgaaaagctcgaacgccgcgtagcccttctggaaaacggcgtattggaagaatacaccatcgagcgcgaaggcgaagacaacatcgtaggcggcattttcaaaggccgcgtcaagaacatcgaaccgggcctcaaagccatgttcgtggacatcgggcaggaaaaaaacgcctttctgcacttctgggacgcgcttcccgctgcactggactccagcctggaagaaatcgaacgcgaaggccgtccgaaaaaacagcagcgcaaaatcacgtccaaagacatcccggacatctatcccatcggctctgaaatcatggtgcaggtcaccaaaggaccgatcggcaccaagggtccccgtgtcacaacgaacgtatccctggcgggacgctacctggtcctgatgccttttacggaccagttcggcatctcccgtaaaattgaagaccccaaagagcgcctgcgcctgcgccagatcatgcagaaactgaatgttccggacggaatgggcatcatcatgcgcacggtagcccagggccagcgctaccgccactttgtccgcgacctcgccatgctgctggaacaatggtacagcgtggaagaaaagaaggaggccaatccggcccccgtctgcgtgtacaaggaaccggacctgattgaacgcacggcacgggatttccttacggacaccgtagacaacatcatctgcgacaacgcggaaaccacggaacacatgcgcgccattgccggaaaaatttcgcgccgcgccaagcgccacatccagcacttccccgtgcgcacgcctatctttgaagaactgggaattgaaaaacaaatcaatgaagctttccagcgccaggtgctcctgccctgcggaggctacctggtgattgacgaaacggaggcactgatcgccattgacgtcaacaccggacgcaacaagggcaccaaggatctggacaagaccattctggataccaatctggaagccgcctatgaaatcgcccgccagcttcgcctgcgcaacatcggcggtctggtagtggtggactttatcgacatgcgccacaggaaggaccagcaggccgtttataaggccatgaaggaccgcctgaaacgggacaaggcaaaaacccaggtactgcagatcacccccatcggcctgatggaaatgacgcgccagcggctcaacgagagcctccgggaatccgttcatgatccgtgcccgtactgcggaggcaggggccgcgtcaagtccgtgatgaccatgagcgtggaaattcagcggcaaatttacgcctgcatccagaaataccgggacaccatcggagacatggttatcgtcgtcaactcggaagtgctctcccgtttcaagaatgaagacgccagcctgctcatggaactggaacgtcagcacagcggaaggctgatcttccggggcgaccacaaccagcaccgcgaatccttcgccatttacgacgcccgatacgacaacaaacccctctaccagtccgggcaatagcctgaaaatcaaatccggctttccgggccgggcgataccctcgcccggccttttttacgccgccatgaacaacatccccacttcccccaacgaccccgtcaacacggacattctgctggtggcggaagaccgcatcaaagggttccgccgcctgcccttccacgccatttccgaacaatgcggacatcctgttccggtggttatccagcggctgaaagccatgatggaggccggagtagtgcgtcgcgtgcgtcagacgctgctggcgaccaagctggcccagggagccctggtggcctggtccctgccggaagaaaaactggatgccgcttttgactggatgaaggagctggacccttttacgggccatgtggtgctccgcaatacggatgcggccaaccccggcgccaactacaggctctggaccacggtcaaggtgcccgtggggtgcggcacgccggaggaacactgcggcatcctgaaacgccatatcggcgcagacggttatgttctgctgccggcacgcggcgtctttgcgctgggggtggggcacatgcgccgcaggggcctcaggcccggagaaaaaactccggaaccggcccccatgcaggaaacgaaaaccgtatctctctcagaactggaatggaaggtgctcctctccgtcaaggaacagctcaggcctgaggaaatggtggaagatccctggtccctccgtgccgcccgggcaggattggaaacggaagaatactgccgtacggcggaagaactggaccggaagcaggtcatcggccgtttcgccacttttctggaacatgtgagagccaaaacggacgacggccccgttaccaaatacaacggactgttccattggacggttccctccggcatggaaatccgggctggagcggaatgcgggcgccacatctgcatgacccattgttattggagaacaggcggagatgtttttggaggagcgcaaatcatgggtgtggtacacggattggaaaaagatgccgttctggagcacaaggcggcgattgaccgccatctggaggcctccggcattcccatcctccacacggctgttttctggggcgaacgttcggaaatcaagccttccgagatttctccggaactgtataggaaatggatggaagaagtaaaaaaagctcccgttctgcagtaactctcttctccacgcccgcctccggtggccttcccctggggtagaacagcttttccctccgaactcccgcgaatgccgtcacgaaggcacaagcatttttaatgccgcaactgagatgccggctgtttcccctccctccgtcctgcagcaccgcttagttccctattcccggcctatagcggcttaataccgttttcccggacgttccaggatctttgatatattttcctgtcaattcaggaaacgggactgaagaaatccgtttcaagccttcagggagacgcacgcctcaacctgatgagctattcatgttctcctttgctccggcgctgtttcctttccgggatacaccgggagaggcttctgcctgcagaaacaagaaaaactcaacacaagggccgtctccccccttacggggagacggcccttattaaagaaatatcggccggcgaacaacctgccgcgaagctttattactgctttttctgcggctgtgcgggagcctggtcaggagccttggcaggagcaacagcggccggatgcttgtaggaaaccgcaaaaccgtcatacttggcaggcagattcctgtccgggaacatcagttcatgcaaacggtacagggcggccgcttccttgacaggagcgggacgggacttcatccgtgaatccggaatcacagcttcgggattattcttcctggattccacggcagatgagacgacgggattctcaaagaatttgacaacatccggcatgcgcaggtaggcatccagggagcgggccacgcaggcagacgccagttcttcatcggaaccatgcaacaaaaccagggcttccgcaaaataatccagcgccttgttccaatcctgggccaccatggcggccgcacccagggcatatttcatccgcgcctgctgggggcgggtggcattctttttggttgccaggaaagaaccggcacggcttttcacgccgttccagtccttatctggaatcaaggccatgatttttgccacctccaggtcattctgggcggaaggggacaaattggcccctctgacgggaaacttggccgccaaccctttgactccggcccaatccatcatgcgcatggcgcactccagttcatagacggccgcccgggcggacaggctgtccttgatggaaagcgttgaggcatacttattcaccagagcgtggaatttgttgcgggcttcctggtacttccggttttccatagccaccttggcatccacaaagtcgtccgtttcaaaaatatacagcgtcttgaaggcgctggccatctgctgaaggacttcctgggattccctgctttccacaaactggaccgtgggtccattggaggaaagaatgtagatatccgtcggacggccattcttgatggtcggtgcggcaactctggcgcgcaggcgctggggattctgggcattctgggccatggacggaaccagggaggacagtccggccaataccattattactgaaagtgctttcatatgattgattactaaacctcttgttattatttctggcccttggcggcgcgtacggctgcttcataggcggcaatgtccgcccgttcctggctgacggcaggatcggaaccgaacttggccgtcttatccttcacctcattgaccagggcactgtcctccgccgtcatcttcttgcggttggcgggagtatccagcaactgcacgtactggctgcaagccttccaggcaacgtacctgtcggaaggctgcttgcccgcaccctgggacatcgtattcctcttccacagcgtatccatctgtgccagcacggcgggggcggaccacttcacgagccccttgtacgtacccgtgatgttcatgaagttaatcaacgccttgtccagctcattctgcttcaggtaggcttcaccctgcagatagaggacttccggcagattcttcttataggtcttgttttcgcggtacttgtcggcagcggcaatgacggctggccagtcctggcgggcggaagtgaacttgaccagattgtactgggcgtcttccatggccttgcggtccgggttggagctggattcttccttgctcagttcatccctcatcatcttgatggcggtgtccaccttggcgttatccttgctgcgccccagagctacggctttcccgaagaccgcattcttgcggtacttggacatgccgttgatgcgggccttcttacgcaccgggtcaggttccgacgggtccaggatttcatcaaagtaggagatgctttcttcaggctgggaagtgctagccaggtgcatgccaagcttcacaagcgtgtacgggggcagatcggaaggcttgaagtcgcgcttcagctccacgaagagctgcttgaccagaccttccagggcggctttctcggcacgctgttcgtccgtctccacaggagccttttcataccgttcctgagtctgggcaataacggccatgcgaagcatggcgctcagcgtcttgtctttatcattgtccacgccggggaaccggtagaagtggttgcgcatggcattggcatccagattgcggcccagggcctgattgcttaccatgtacgtcttggtataggaattgacggcctcttccagaagaacggtcatcttgggatcgtccttcttgccttccctcacaataatttcctgcatcttgacggatgccgggtcaaacatctccttgtcatccttgaagaagtccatggcggcggcggccagctggaggctgtagcggctgccgggctggtcactgtctttccagtactcgtcataccatttcttgacctcgtcccggcgcgccgtcctggccgtttccacggcttccttcggttctaccggaagaggcttcttggtagcgttaataaacaggttgtacacggcctccgcagcgggacgcttgtcgcccagcttcttggcggactccagagcggccaggaaatagccttccgcttcctgctcatgctccttgctgcaagcacacagattagccagcaaattgttggcatacgggaacaggcggtggtccttgaaattgtccacaatttccttcgcctctttcgcggcaagctcttcgtctccggggttcttgcggttcaggtagttgaaggcccggtcatacaatacggcggccatattggcctcccccttgtccgggaaacgggcaatgtaattggtaaaggaccggatggcttcatccgtattgcccaggttcgtgtaggtttcaccaagaaggtacatggccgttttcagataagtgctgtcacggtattccttcacgaagcgttccagcaccggcaccgcttccttataacgggaggcgtcggcagcccccaggttgaacagggaggctcctttgcagtacagggccagttcatagaacttatgggtggggtcatccttatgcagctccatgaccttgtccgcctgctggacgcagagatcgaatttcttttccttcagaagcccttccaaagacagcgtattaagcatgggggcatacttggaattggggaattccttcaggtgctgcgccacaagctcgcctcccttgtccgcttctcccagctgccaggtggtcatcgccagataatacaggttatcctccctgcccggagcatccgggtaggattcattgataagctggtaggcggcgcgggcaaccctttgggaaccatgcaccagggcttggttgcccataaagctgaacgtgaaggcgtccatgacctttccttcctccttcatcttgttgaactggtcgatcagggccgtcaccttcgctctgtccagcgtatgggaaaaatccgtcacgccaggcacggccccgttggcacggcccagacgatccagggaataattggcatccgccattactccggactgatcgggaagaaggcccatcagcaccatcgccagggaagcataatcttcagactctttctgctttccatcctgaagcagggaacgggatttctccagcacttccgcaacgtaactcaccagccgcggggcgtacaaagccacacgcgtggggctgatattcatcacggaagggtagttttccacaaacttcaccgtctcactgcatttgccggtcttaatggcggcatccaccatcgccaggaagccattggtaataacggcatccgtaatgcggcgccccttgtagcgcgacgtgacgcaagaggtaaggttttccatccctttttcaaaagcaggcggggacatcttgaaatagcactgggccagaagaccctgcacttcaccggcattgacgtttctggcgacaggatcgctgcggtattctttcaggaatttttccagcagctccgcgcccttggcaaaatccccaagacggcagtaattttccccttcccggaacagggccattttcacgagctggtttttagcgctcgggaacttggtgtaacaagccttgaacgcttccacagcttccttgtaattcttcagctgggccagacagacgcccttctggtaatagaaccagccgaaaccgtcatccagccccagcattttgatacggggttcataaacgcggatgcagcgatccacggcatccagggcttcctgccacttcccttccttaatggccgtcagggccgtgcgctggtaatcgcgcgggccatgctgggcgccggatggaagaaccgccccgatactcagcacggaaaccaggcctgcagccagtgcagtagtatagtttgatttgatcatgtgtttaaaattcgttgaaacagaagagataataaaacaggcgcaatatctgtgcaaatacacggaatacacctatctgtaatggattgcgtcattttaacaggatgagtcaaactctaaagaagaaagttttatctttttagtcatccttgcaagaaagttcttccaccccgcgtctatccggagttggagcaggtctgtgccgcccggccggaaaaatactgctttttccggtataaaaaggctttttcaatatccctctacacactctgcggccaaaggaatgcacgctttccgctttcaaaagtttttcggtggaacacagcccactgctccatcatgcccttaaggagcctcgaatcccgtctgtcaggatgccagaggcacatttgacatggcgcaaacagatcgtccacccaaccggaattccatttttccggcatccgcagccatgccggccttctccccggcaacagccatcccctcccctctcagttctcctttttcaacatgaaatcccatccgcgagttgaaagggaatatcataaaaaacggtgcggaattaacgcctccgtctttccaaatgaaaaaacagctatccccccacgggagggacgggaaaaaatacacttcctcccccgtacttcctgataacaatatcacttcccggaaaccatcaacaaggacttcctgttactgcacaataagataaaggtttcgagccgcttttctccctgctctgctgcatcctcctttcaatatactctttccatccctcccgtgaatgaacaggttttctgaagcaagcccttccaatactctcctgactgcctctcctcctcccagccacacacggaatgcaatactggaaaaagacggcaacacttctcctgaagtttcgttcccggacggaattcacggctatccgcctgtcacctgcggtcccacaaaagggaaaaacggattccgcgccgggctatgaaagaagtattgctccagccaaaactgcatatccccaccagaacatttaccgtacaacaaaaagggcatggtccggctccggatttctccacggggcttcccccccttgccgtaaaatgctgccgtatgcgggcctccgtttctcccgttaataacaaaaaaagcttccgctccttttgggagcggaagctgagagtcaatgaaaaaaataaaggtaatttacttttaactgtccttaaggtcggtcagagccacggttgtaatcccggcctccgtcaacgcattcatgacgtcaataacgcgctggtgggggacatccccttccacccacaactgcactaccggcttggtgcctacagcgctggcctcctgttttttggcttccagctgctggacgagcgtcgccaggttgtggttgttcatgtcattgtcgatcatcaggctgttgtccttgccccagtaaatggtgccgtccttgataatgcggatcagcgccggttcaatctgggaggcattttcgctcacggactgccctggcatggacatatccaatttgcgttcctgaatcagagaggtcgctacaatgaagtaaatcagcagaaggaaacatacgtcgatgagagaggaaatatccagcttgggatcttcatcctcaaccgtttccagttttttatgtcttgccatagcgcgtaatgttattcagccttggttgcaggagaggaattcttggcaggcagtacggcaaagatcactttgactacgccgcattccgcagccgcgcggattacttcccgggagcctttgaacagagcctgctggtcaccgcgcagatagaggcgcgtttcaaaatcctgcttgtccttgaagcgttccgcaaggtttttgatgtattccttgagttcatcaaaggaattgagcggagtgcctacgtcggaggaccagagaacgctgggatctacgccgggcggccgcttacccgcaccttccccataaacattcaccacaatgcagccgttggcggatttcacttcaccggagctgctggccgtgggcatctgaatgttcttatcctttttaacggtaatggccgtagcgttcaccacgaagaaaatcaacaggaggaaaaccatgtcgatcatgggggacatatccatttccccattttcttcttcaggcgctacattagcttttttcttacccataagctacattttgttgaggttttccggcccggttccgactgagcggacgcttccgggccggaccgcctgttccggcaatcaggccagaccttcggggatgcgggcaagctgggcttcggcattcaccacgttgatggaggtgttcaccatttcctgcacagtgcccacgcattcggcaatctgggcgttggcaatgcccttctggaagaagaagaacggagtggcgataatggcgttgatcaatccccagaacgttgtcagaagagccacggaaatgtcaccggccagctgggtggggtccgcctggccggcggtagccagcgtaccgaacgcgcccaccatcccctgcaccgtcccgaacaggccgagcatgggagaaatctgcgcgcaaagggccaacatgttgatccatttgaacacggaacggctttcattggccgtaaagtcggccacggcgtcttcaatagcatctttgccgaggtcttccggacgagtggcgtccacgttcggcagggcgtaggcaaccagacggcccaaataggtggggctgctagccgcaacttcaatggcggaccggatgcggcattcggccatcagctgcaacagagtgaccttgagatcttccgggcagaatttttcctttttcagggctaccatgttgtaaatcaccaggaaaatgatgaaagcttccaccagcataatcggaatcatggtccaaccaccggcgatgatccatttgtcaagcatggtctgttcctgcggggcaacggcttcggcggcttcctgagcgaaagcggatgtagaaaacgcagccatcaggacggaagcaaatgcaacgaaacggaaacccagtctaaaaaggttcttcataatttaagttctatggttgttcgaaaagatactggtgtattaaagcatgcaaattcagacttgcaagcatcattttagaccctgtaaaaaattcagacgccttcgcagccgctctcccgggccagctggctgcagatggggcagcgccccccgcatccccgcgcagggcaatattcacggccgtacaagacaatacgcagatgaagatctccccacgatttttcagggaaaaggcttttcaaatcgcgttccacggcttccaccgtttttcccgcgctcagcccccacagccgtgaaaggcggaaaatatgggtatccaccggaaaggcaggaacgccaaaggcctgaaccatgacgacggaagccgttttatgccccacccccggaagagactccagagcagcaaagtcgcaaggaacctttccctcatatttttccaccaggatgcggctgaggttcacgatggaggatgccttcctttccgagaggccgcagggcctcacaatttcccggaccgcttccacatcctgccgggccatttcctccggggtggaggccagggcaaacagagccggagtcaccagattcacccgcttgtccgtacactgggcagacaagagaaccgccaccagcagcgtgtaagcgtcacggtgcaccaggggaatgggaggagccccgtacagggacatgagttcctcctggacaatggaagcccgtttttccgtattcatgccgccagattaccactccgcccgcacggcggaaaataaaaaagcgccgccatgcagcgatggcggcgccgggatggaaaacatgggtcagtcggccttggcataaaaccccttggaaacgcggtgctgcagggccgcatacatggcgcggcagtgcctgtagccgcggcggctgccgagcacctccagactgttggcgggatctccccagcggacgatagtcagttccacataacggcggccccactccttcatcagctttttgttgggctggtaaatatcaatggttccggtgccgaccagggcgcttccgtaatcatcaacaacgtaaaggtagggctggcccttgatgcggaaagtagtccccaagggataaacggaccagtctgcagcggcgctgcggacggaagacgtgtatttcagcgccgtaccgacggcattccggggaccgtaggccaaatggtcgcgctcggaatgggtataagccgtggtgcgcactacgcgggtgcgctgggcgggatgataaaacggcatcttgtgcttgtcgcgtcccaacttgggaagtttggaagaaggcgctgccgaacgactgggcgccaggggctggacaaatccctgggcagtttcacctacacgggccaaaacaagagcgtcactactggatttccccatgccggttacagcgccgtttgtcgaacagctgctgacaaacatggccgcgacggcacaagacagggtggcaattattcttaaattcatgcagtacgaggttaggcgccatacacatggcagtcactccggcaaaaccttcaggccatgtgcggaagccggaaaatcggcaacggcggctcttgggtacgaaataatccctgccttggcaatcctttttttccgcccaccccctcccaaacaaggaaaacctattaagataaattactaaaaataaacaatatataaaacatgccgcatttttgtcatatcatgacaaataatatacttcccgaaatacttttttctatcacaacacgacacacttttttatttttatcatatttcatttataataaaaaatttacacgcatgaaaaatacacaatccctcaaaaatattccctgaaaaaagtgtcaggggctgtactccgcaaaggcgtcatgagcaagaaaaacgcgtctcccgttgaacggatttccctctgccgttcaaggtttcacgcgaatcctaatcgactccttgccatatccacattttcacagcccttccatgcggcagaatgaagggctcaggaagaggttggtgagaacatacccttataaggggaaaccggaaaagtccggattctgccgggtaatgttcccgccgcagaaatgcgctatgggaaaagatgcgcaggcccggttgaaaaaaagggctcccctcccttgccgctgtcttccaaattctggataacgctcataccagaaaagcatatccagccggagaaaaaactttcccctccgtttaacggtatctgccgcgggaagggagctcttatggaatttttcttctttcccattcccttccgggcggccttccataagagtccccggcgtttcacccggcagacaggcacataccgaatgggctgttgcatccatccggaaatagattacactccggaacgaacatgtccgccggccttccccaacacctcacgctggattatctacgcgccctgctatcccggggcgtggagaaaaccaccgtcacggaggaagccagaatggttctgagaaaatgggtcatggacgcgcgccggatatccggaacccccccccccgcttccgtttccgccaagcctgccgcaaatgaaacacggccgaaacagcccaccccggagcagacgcctccagattccgtggatgaagcatccttcggcaatgaactccgggatatcctcaacggagtacagccgcacagaacggaggaggatgctccggtgccccgccatatttcctttgatctggaaggtgaaacggaggaagaaaaactgtcctccctgcgggagctggtcgttaactggccgccgctccggaacatggattccttgagggaaacgcccgtgttttcctccggcaatcccagggcggacatcatgatggtaacggacgcccccggcctatatgaagaaaaacagggggttcccctggccgggccttccggacaaaagctggacgccatgctgaaagccatggggctttcccgttccgatatttatctgacccatctggtcaaataccgcccggccctcccccggcagcttaccaataaccgcccgcctacagaccgggagatagaaatttccctgcccattctccgggaggaaattatgctggtgcgcccgaaagtagtggtggccctgggagcaatctccgcccgcggcatcctccagtcaggagagacgcctctttccgccctgagaggcaccttccacacagctttcaacacgcccgtgcgcgttacttataatcccagttatcttctccgcacggaagatatttcagaaaagcgaaaggtttgggaggatatgctgtgtgtcatggaacaggcaggcctgcccatctccgaaaaacaacgttcctatttcctgcctaaaaagtaatatatggattatttaaacagtattctggagcgcaaacgcgccgatttgaaaaaacttcttcccctggaaggaaaattacgggcctccgccatccagcggaacgactacgcgggattccgcaccgcggtggaccttggggaaacccgcctctctgtaattccggagatatccagggtacatcccgccctccgcctccgggaagcagcccaggatatccggcacatgtacggcatgttcctccagggcggagcgcagggcatttccatcgctgtggaaccggaagtatacggcgggtcatgggacatggtttccactgtttccagaatcagttccattcccgtcatggcgcgcgacgtgttcattcatcccgccatgatctgccaggccatcgtctcgggggcggatgccgtcaatctggtggcggccgctctgcaagcaaaggatttgtcggagctgtaccgcatggcttccgggctgggattggacgtgatgatggaggtccataccctgaaggagcttgaaaccgtcatggatctggaagcggaattcatctgcatcaacaatgcagacccgcatactctccagtccaatcctgcagtcacggagaaactcattgaagaaatacccgcctccgtcactgtcctgtccgcagggggcatccgcaccgtggaagacgcgcgccgcatgctggacgcaggagccaatggcgtccttctccaagacgaacttgcccgcatggatattccccaggatttcatggaggccattctggctctccgggcggactgagtttccactcccgctatattataatagaaaaacatctgcatccgcatggggaaatgcggggctaaagagattgtcccgtccgctgcggcagggcttcgcgacctgagctccgtatccgccgcgtttccttcccgcctttccctgccgtcttttcatgaagcgggcaaatccttcgccccgaatgctccgcggatatgcctgaattccggaggcatcccttccctgtacaggacttccacaacatcgtaacgggaattcaccggttccggaagcaggcgaagccattccgccgctccccggcgtatcagcgcccttttacgggcattcacagcgcggcgggcacctccataaccattccccgtacgggttttcacctccacaaaaaccagacactccccttcccggcacacaatgtccagctctccgcctctgacgggacgccagtttctcctcaggataacgcacccttccgcacgcaggaaggaggccgcagccagttccccgtacattcccagccatgccgtatcccgcttacccctgctcagggatggacagttccatttgtgaaaccggcgcaaacgagcggcgatggagcggacagggcccatgccgccgcagagcttccatgtgggcttttgtgccatatcctttgtgttttgcaaaaccatactgcgggtaggaagcgtccgcttccatcatcatgcggtccctcgtcaccttggccagaacgctggcggcggctatggaaaggctcctgccgtccccctttacaatggcgcggtgcggcacaggaagccccttgacaggcaatccatccaccaggcagaaatctgcacgcagggccagaccttccaccgcacgcgccatcgccagatgagtggccctcaaaatgttgaaccggtctatttcttccacggaagccactcctacggaacacaccgcctgttcacactccaaaagagccagaaacaggcgttccctttttgctgcggtcaactgcttggaatcgttcaaaccggttaactcctccgccagaacaggcaaaataacggcgccggctaccacgggaccggccaacggcccgcgcccggcctcatccactccagccacgcaaagaaaaccggaggcccgggcctccatctcaaaactcatatccggatgcggtttttccttcatggcgctattcctcctcctgttcctccggaaggcgggccagcagaatctgcgtgattctcctgccgtcagaccccgtcaccacagcccggtagcggccaatccgcaattcctccccttcttccggaatataacccatccggctgattacgtaaccgcccagcgtagtaacgcccggacaatccaaatccatttcaggcaggtaatctgccaggtcaaacagggtaatagccccattgacggcatatgtatccttgccggttttcacaaactcccgcatttcctcctggtcaaattcatcctgaatgtcatcccccacaatctgttccagcacatcatccaggaataccaggccgatagaatcaccgaattcatccactaccagggcaaagtgggcatgttctttcagaaagaacgtgagaaggctgtccaggggcatcgtatccggcaccacgcgcaattcacgccgcacgctcctcagatccggattttcccgtcctaccagtttgagcagatctttgacatgcacccagcctttcacttcatccaggtggtctccctccaccagcggaaaccgggtgtggcgggatttccgggcaagctcccagttttcctcaaagggagccgtcaaatccatcacatccacttcagagcgcggggtcattacgtccttgacgcacatatcgttcagttcaagggcatttttggaaatttcagcctcctgcttcgtcagctcgcgggaacgttcgctttcttccaccagatacatcaattcatccgtgctgtgcaccgtgcacgccgtggaacgggggtctatgcccagcaggtatttcagcacaaaccgcgccattccgcccgtcaggccaagaatacccgtatatctgaacaccgtataaaagaaatacagcaggggaaccgtcgccagggcggccttgtccggctggcgcatcgccatagccttggggataaactccccaaataccacctggcagcaggcaaagaaaataaatgtaacggccagagcgattccgtaaacggaaaccatgcctcccaatcccagggagaccagaaagggagctgtcagttccgatacaaaaaacgttcccaggaatcccaacgccagggaagaaagcgtaatgcccgcctggcaggcggccaaataaagatcaggatgcttggcagccttccgcgcccgggccagttttttccgggttcgggccggaacaccttccccggcgtgcagctggctttcacgaaccttcatcaaggcgaactcgcctgccgcaaaaaacgcattcaacaacaaaaaaaggataaagccggcaactgccagcatcatcccacccagcgccgggcctgcaccgggcgcttcagcggccccgaaggccgcaagaatactcagaggatccggatcattcattctgattcaaataatatattcggagaagaaggcagagatattgcccggcactttgtcatcacagtttttcataaacgcccttgtcccggcgctccagcacggtgaatccggcagccttggcgtctgaaacggaaagaggcttggtcacctccggcacattaatgcggctgatgaccttacgcacgggatgcttgcacaccaggcatttttcaagcggagcacggtccacgggacgcctcaactcaaaaccgcggcggcacaccggacaggactgtccggggtcgtcagggttttcagaaatatactcgtatatgggcatagcaaaacgctaggctaaataaaaatcagcctagcgtcaaaatctttataaggctgcaaccttttcctgtccttaccagctggacttggtcacaccgggaatcataccggcattggccagttcacggaaggaaatacgggaaagcttgaaacggcggataaatgcacggcggcggccggaaacaaggcagcggttgaccgtacgggtcgggcttgcattgcggggcagcatggttaaaccgatataatccttctcagccttcaattgcgcacgcagttctgcatagcgcttgacggtttcagccttttttttgtctcttgcgatccagctcttcttagccataagttcggcggaataagtagagggacggggatgaaaaatcaagcgctttttttcgattttatcaaattcaagccgttttcaatgtcatccggcctttccggcggtctttgcgcatggaattgaatacctgtttctttcacaaacatatcgcgtgaggaggcatccggaacattcgcaacaggatggaagaagctaatttatttaactcttcctaaccattatctccaacaccccaggaaacatatttgaaagaagttcatgcaaaataccccgctcccagggctcggaggacattttctgaaaatttttctagaaatattcctgcatgaaaacggcgatcgggcagggaagctccgtcgtaaaaaacggcccttatctccgtccctgcagtaaatattgaagaaaaaagacatggggagttctgcctacacgcaccgcctgtttcagatccattgcgcaatcaaattcatcatcagggagggcagaaccgggaactgcaccatttacgcagactggcggcggaaccgttcaccggacaggcttcagctgggaatttccgtgagagtatgcaaaaagaacgcaagatatggctatctttatataggaaagcggctgtttcactcctgttccggatgatggccgaagattgccggattcatgaacggaaaccggaaagggccgacattttcagcattttgtacggagtaccgttttccaatgggttccggtaaaaatcccgagtaaattccggaaaaagctgtggaagaaatgagcgttgctttccccggtaaggccggttcatctccgcttggaaccgtttcatcaaagcagtctccggcggctccgggaaaaagcccgcggcgaaacatgattttgtcctttcctccggggggggaatggggcatcatgccgccgcacactaatcattgacgtacatgaaaatcgtagttgcatactctggcggccttgacacctccgttcttctgaagtggctcaaggaaaaatataatgccgaaatcatcgcctactgcgcagacgtaggccaggcggaagaactggacggactggaagccaaagccctggcgacgggcgcctccaagtgcttcatcggcgacctcaaggaagacttcgccaccaactacatcttcccgatgatgcaggccaatgccctttacgaaggccgctacctgctgggaacctccatcgcccgcccctgcatttccaaagacatggtggatctggccatccgggaaggcgcggacgccatcgcccacggcgccaccggcaaggggaacgaccaggtacgctttgaactggccgtcaatgccctggccccgaacatcaaggtcatcgccccgtggcgcgatcccgaattccgccagcagttcccgggccgcacggaaatgatcgcctacgcggaatcccacggcatcccgatccggcagtctctgaaaaagccttattccatggaccgcaacctgcttcacatttcctttgaagccgggatgctggaagatacctggtacgacggcaccacccccgccgaccgtgaaatgtacaagctttccgtttccccggaagacgctccggaccaggccgaatacatccagctcctgtatgaaaagggcaatgtcatcggcatccagtacgatggtctcgacgttctgctgaaagaactgggcgtcaccccgaaaggagaacgcgacgggtataccctgctcagccccctgggcgtcatgtacgtgctgaacgccctgggcggcaagcatggcatcggccgcgtggatatcgtagaaaaccgctttgtgggcatgaagagccgcggcatttatgaaactcccggcggcaccatcctgctggcggcccaccgcgatattgaaacaattacaattgaccgggaagtgcaaaaggtgcgcgactccctcatcccggaatacgctacgctggtttacaacggcttctggtttgcaccggaacgcgaggccatccaggccctggtaaccaaatcccaagaaaccgtcaacggggaagtacgcctgaagctttacaagggcaacgtcatgtacgccggacgccgttccccgcagtccctgtattccgaagaaatcgccacgatggaaggcggccacgaggaactgtacaaccagaacgacgcggaagggttcatccacctcaacggattgcgcctgaagcaattcagccgtgtcaacaaaccctacggcaattaagcgcccgtaacggtaccactttttatcaaaccgtccggaaaaggtattccggacggttttttctttgcaataaccttttcttttcctgcgtagtgaccgttatgggatttctttcacacgcatttctggcggctgcattttcgctctctccgtttttggcatccgccgcggccttcaaacccaatatcatttttatttacgcggatgacctgggcatgggcatgctgggctgctatggccaggaaatcgtgaaaacacccaatatcgaccgcctggccagccagggcatcatgttcacccggtgctacagcagccaatattgctgcccggcgcgcgcttccctgcttatgggcgtgcacgacagccactcccattcctacacccagacggcgggagccctggtcatcacggcggaacggaaaggctggtccaatgagcaactggaagagaaagcggcacgggcagcacgcatcaaggccgccgagggagaagtgttcctcccggaattgctgaaaaaggccggatacgtcacgggacagttcggcaagctggaatggggattcaccacctggcacggagaattgaaaagacacggctgggaccgctatgtagggtacatggaccatcaaagggcccatggcttttatccctccttcctctggaaagacggcgaacgcctccccctgaaaggcaacatccacgccgacggaggcaaaaccccggaagactacagtccgggagccacagaaaaacgaagaggcaacagggaaggtaaagtcacctacgctccggacgtgatgctggcggaaacccttcgtttcatagaggaaaaccagaacaagcccatgttcatctttttttccaccaaccttccccacggcccggtagatattcctccggaagaaaacacgtacgcgggctccccctccatccgtcaggcctatggcaatgccagcggaaccaacagggaatgcgccggagcggcagaagaatacgcttccatggtggacaagctggacaggcaggtcggagccatcgtggaccaggtgcgcaagctgggcctggacaagcgcaccattatcattttcagttccgacaacgggcatgaactttactaccgtacagataaaggccgcggccgcgggcccgactgccacggaggcgtcctggacggcaccggggaactgctggatgttttccgcggcagccgcggccgcgttgggccaaacaacgccatggccaatctggccggactgaaatggaccagccatgaaggaggcatccgcgttcccctcatcatttcctggcccggcacactgccctatgggaaggtctgccacagcctggtgaccaattacgaccatatggcctctttcgccgatcttgcgggggtccgcatgccggaaggtaaagatgccgtttcctatatagatatactgtccggcaactccgccaggcagcgcgattatgtggtcgtggatcacaccgtcatcacgggggacggctggaagcttacgcaaaaacaaaataaaccgttcctctttcaaataggcaaggaccctgaagaaagacataatcttgcggaaacaaggaaagaccagctggaaaaactccgggccatttacaggaaggaagtgggcagccccagaaaagacaggtgaaatccggagctggcccggcatccccctttttccgccgggcgtttttgcaggttgaaacctgaacgttccgcatgtagagttccccggtgaagaacaatcccccctccccccgccagacagcactaaattgcctgaggagctggcatgcaggccgctccttcgcggaaaccctcgtggaccgggaatgttcacgaaccgcgcttcccccggcagacaggcacctggtgcaggctttggtcttcggcgtattgcgcaaccagacctggctggaccacgtcatcggaaccctccggaaaggcaggctggacgtggaagcgcgtcttattctccaactggggttgagccagctttttctgctgggcatggcggaccacgccgctgtgtatgaaaccgtgaatctcgcgtccgtacgcctgagaggactggtaaacgctatcctgcgcaacgctttgcggcgggagaaaaccattctggaggaacgggaaaaacttccgctttccattcattattccacccccgcgtggctggtacggagatggacggaacaaatggggccgcaaatgacccgcgacctgctccgctggaacaataccacgccgcgcctgtatgtgcgcgccaatcctctgatgcccatgaaaaatattccggcctccctcgccccgctggaccgcgcgcccggctggttctccgtggaaggccttctgccgctggaggaaattaaaacaggctccctttacgtagcggatccttccacccgttattccattgatttgctggccccacagcccggagaggaaattctggacgcctgcgccgcccccggcggcaaatccgccgccatcatcgccgctaccggaggcaaagcccacctgaccgccacggatctccacgaacaccggctgcccaccctgaaggaaaacctggacaggcagggttcttccttcgtcaggacggcacaggcggactggtcccttccctgccgcacggaatggaagggccgctttgacgccgtgcttctggacgttccctgttccaacaccggagtcatccaacgccgcgtggacgtgcgctggcgcctgactccggaggaaatccgccgcctggccgcactccagaagaccatcctggaaaatgcctcccgcgccgtcaaaccgggcggcagactggtttattccacctgttccattgacgcggaggaagacggactgctggtcagggactttctgcagaaccatccggaatggacgctgaaagaagaaaaacttatccttccccacgaagaaaaatcggacggcgcgtatgcggcccttttgatctgtgcttgacctcagcttcaatttgtcaacaatgcgtgttcctgattaatatcattccattatgtcccgcaaacccatcattgccgccaactggaagatgaacatcggccccgccgaaggcgcccagttcatcgaaagcttcaaaaacctcattaaggggaaagacgtcgcgtgcgacgtggtcatcatccctcccttcaccaccattccctccgtgcagaacgctctgggcggttgctcctgcatcgccgccggagcccagaacgtctcccagtacgacaacggagcctataccggtgaaatctccaccagcatgctgaatgaactgaacctcaagtatgtggtgctcggccacagcgaacgccgccaatatttcggagaaacggatgccatcatcaactccaaaatcaagaaggccatcgccgcaggcatcacccccattttctgcatcggagaaacgaaggacgaacgcctggggggcattttggaacccgtgctggaaatccagctcaagggcggtctcaaggatctcaccccggaggaggtatccaacctggtcatcgcctatgaacccgtctgggccattggcaccggcctgaccgcaacttccaaggaagcccaggaagcccattcctttatccgcaaggttatttccgacgtcttcggagcagacgccgccgccaaggtgcgcatccagtacggcggctccgtaaaaccggaaaacgtggaggaactcatggcccagccggacattgacggggctctggttggcggcgcttccctgaagccggaatccttcgctgctctggtaacttccgccaaataagcggaatccggcgccaccctttctacaggccggtccttcacgggaccggcctttttcatctccggagcaccggcctcgctcttttcacccaagagcgcagtttctgccttttcaagcagcctgaatcgtgcataatggcgggaaatcatgaaaacccgcttacttaccccacgcagcaaaggtttcacgctcattgaagttctcgtagtcatcgccatcattgccctgctggcaggcgtctcctacagcatttattctcatgccacggaaacggcagccagaacgcgctgcacggacaacctgcgccgcattagcgactggggcaaggaattcgcaggccagaacggcggaaaactgccctccagcggcatgaaagacagcctcctgagcgccagggaatgccggaactggtgggacgccctggcgcccatcgttaatgcggaacaacccgacctgatcgcccggaacgccaaggaacccaacatgctcccggacacgttccgctgcaaaaacgacaagcgtccggaaatccttggagcggaggatgccaaccttcccgccgggccggacaccatttcctacaccagctggctggacaaccggaaggggcgtcccatgaatgtggcgcgcggccagtccctgcggggcaaaccctggatcagcgacggcatcccgattgacgggcgcagcgtcatcacggaacaggattttgaggaaatcgtagtcccggcccttgaacgccaccagggaggaatcatggtgctttatgcggacgggaaaatatcccccgttgaggaccctacgcttaacaaagtcacccaaggttcctgaaccccttgtttctccgcccggcgcgggcgggaagctgccggaccattgccggcaatccagtggaattttcttcccactctcactgattcgcctttacgaaaccgggataatcattaaggttagcgtccagatgaaccagcatgctcccttcctgcatccgtacgatggaatgataccactgtctgtggcggggtatatcctgggaaccgttctgttgctggtccacctgtatgcgctggtaaaaaggcagcaggtgcaggcttttctgctggcgtctccgcgcaaccacctgctggctcagattctgctggccggcggcctgttctggttctttctgctggtggctcccgaaggattgggcgtgctgagccgctttcgggtggggctggcggaatttgaaggtatccgctggctgctccagctggcatgccccgtctttctggtgctgatggtcacgcaggtgaaaaacctgctctttccacgggcgctgggcatcttcggcctgatggcggcagctcccctgctcagtgccgccttccttcaggagccagtgaccaggctccttattcccatctggtgttacatcgtcattttcctttcgattctctggataggcaagccctacctgtaccgcgacatggtcaataaaatatgctccaaacctgcttggtggacgcctctttgcctgggaggaatggcctatggagccgccattctgctttgcgccatcctgtggtggtagggaggccgcctcttccggcaccgcttcatcacgcagaaaagacattcagccgcaggagaaggcctccggcaaaaacaggcatacgcaggacggatctttccggaacggcctgttttttcctcctgctgcaagaatcaatagcggttccgcttattatatatgatattccatattcctttcatgtgctctaccctgcgttcctccatcctgtccagcatagccttctggttgcttacccttgtcccttcactggcggacaggcctaatatcgtccttatcctggctgatgacatgggatggtccgacccgggctgctacggttcggaaatacccactccagccctggataccctggccagacaggggatgctggcaacccggctctacaccgcttcccgctgttcaccctcccgggcctccatcatgaccggctgcgaacctcacaaggtggacgtagggctcctggatgacgacagcggacgccccggctaccgcggacgcctgaacccggatatccccaccctgccggaacttctgaaaaaagcgggataccgtacctatctttccgggaaatggcatcttggaaaagttcggggatcctatccatgggaccgcggctttgaccgttcccgcggtttgctgggcggagcggcagattactacaggcctatgccggacagacccttcggtgaaaacgggaaactgctccgtccggaggatctgccggaggatttctacatgacggacgatatcaccaaaacggctctggcctatattgacgatgccgtcaaaagcaggcagcccttcttcctttacgtggcttatacggctccgcatacacccctccaggccccccggagggaaatagaaaaaatgctcccgttctacaacggcaaatccccccatgccattgcttccaaaagactggaaaaacaaaagctgctgggaatcgtccctcctgccgccaaactgggcatggccggcaaattcaatccagaaggctatgaaaaaacttccgcaaagcggaaggattatattgccgaatgcatggccacctacgccgcccaaatcgttatcatggaccgcggcataggccacattctcgcgtccctggaacgtcaccgcctcagtgacaataccatcgtcatgtttttatcagacaatggcgcaacagcggaaatgccccagaacaataaaaacaagaagactaccctccccacaggcccgctgggagaagtcggctgcagggacggatacggccccatgtgggcggctgtgtccaataccccttaccgccagtataaaatagaaacctttgacggagggctgtccgcccccttcatcattcgctacccttccaaaatacgtccgggatcgcgctaccactcgcctttcctgcttcaggacatcgccccaacctgccttgcgtggaccgctctcccaattccggcccatatggacggcaagccgctcaacacctactggaataatcctccggaacttcctccgtccaaggtgtgggacttcattcccaatacctgccctccccgcactatcttctgggaacatcagaggaaccgggcggccctgacaagtcaattcaagctggtggcccccaaccgcggcccctggcaggtgtacgacatcagggacaggacggaacagaaaaatctggcatccagacaccagacgcttgtagaacaattgtccgcacagtacaggaaatgggcggcggaaaaccatgccgaatgacacagcacggcaggaaaacgggcatacgcgccctaaacgtttctatgggaatccccttccggaagaaaattctgatttccgtttcctcaagtaacggaaaacggcatgtgattcaccgggaaagaaaaagcagggaataacagttattcccgtccgcggcaacattcctgtctcccgggcattccgggaaccattcattattttcacactccttgccatcctttcccatgaaggggaattacataaaaatccgcttcttcattcggatttttcctatgccctattttttgccctgtaatcaaaaataattcctttataaggttaaaactaggcaaaacaccgctgtttaccaaatcatttcccaaaaggaaaactcttcttttttcctaacaattattggaataaaagaatccttatcattcaaagaaatactgtattagaatacttctaaattagcaaaaaactcattgattgtaaataaacttaatttaaaatgccataagaaaaaacctttctgtaccttaccttcgttctgcacagccgtcacatcagatatggaatatttttgataatcaattcataacacacctttaacaaaacttgcacagcgtctttttatgttcaaagagccctctttcctcaaaaaagcaaatctgttccagcctattctggttgtcgtgatctccatcatcgggggaactcccatggaaggagccaatacggggaaaatagtccttttgatcattctgggcaccgctttcattgtatggcatgtggaatgccagagactgctcaacaggaaccgggaaaccagggagcatgcctgcgccctgaaaaaccgcagtgcggctctttacaaaaaaacttacgccgccctgagcggagaatacgaaaacttcgccaataaactgaatggagaaagttgccgggaggcaaaaacggacggttccaggggaacgacggaaagcttcaacgaagcctgcctgttcctgtgctccaccattgccgctgcgctggctgaatataaaaactcccttgtctttgaagtgctttatattcaggcagagcagcggaaagaccaaaccttgctgcacgttacaggctacgcacagggagaacacaataacgacaccccttccctgctggcacagcctccgcggcccgtaacgaaaacacccgccatgctggatgaacaattattcgcggaacgccacctcagccccctggttctttccagcccggaagaagtgcagcgcagctttttccggaagcgcaaccagcctccggaggaaaaatacatgcagtatctggccattcccgtcctgagcaagagaaatgaaatcatcgggcttatcgaaatcgctgttaaaaagaatccgttcatttcgcccgtcaccatgctggaagcccatgaattagccgacgttaaatcatggctgtaccatttaaaggaccatttcctgttgtttcatgaaatagaacgcgccgtccgggatggattcccatgacggcagtacggacagaatagcctactacgcccgacgccatatcccttaaaaatttcctgggatatatatattccggcctatttacaatcaactacttccatctttttaaccagaacggttaccgccatataatgctattaacctgtaagtgaaacagatagcacttgggccattttctgcatctgaaacaagaaagagaaaaccctgtaaactattgagtccacagggtttcaaaaaaggaatggtacttggaccgggactcgaacccgggaccaatagattaaaagtctactgctctaccaactgagctacccaagcacttaccctttctggaagggcgcaagcagtaaacaccacaccccctttcatggcaagcgtaaaatggaagatggacaaaaaaagatcaggattccatgcattccagccacctcgcacgccattcggcaggaatacgcgcagggcgcccctgcggcatctggaccagggccagctgctgatgagccctgaccagaagatcattattggaagcgcgcctcatttcaaaatcgcaccagaagcgggcccggtccacggattgaagccatcccgtcgtcaaaatggtgtctcccagaacggccggacgcacatagtcaatctcatggcgcaccactacggcaaactgctgcaaatcgctcatggttttgtaatccattcccaatttagcgccaagtttggtacggcaggcctcaatcatgcgcaaataggccaggttatgaaccaccccgccgcaatccgtatcataaaacatgacttcatcttccgtatgaaacatcagctccggattcatgtctgccattgtaaaaaggaaacaggcgggctgaaagaaaattccggttcagccgcgccatgcatgatgcgtccgcgccagcgtcagcacgcagacggaagcagccccggagcggaggagcagacgggcgcaggagtctgccgtggctccggtcgtaaaaacatcatccaccagcagcacatccctgcccctgacagggctgcgtttcatccttttttcatccgccgcataaattttacgggcatgtctgagccgctgctcccgcgacaagctggcctggggaagcgtatccggcaggcgtttcagcacgccagcatacggccagcccagttcctctcccagcagaaccgccagttcctgcgcctggttgtacccccttcgagcctgtttgccgcggtgcatgggcacgggaacgatcaggcgttttttcccgccgaaccagtgaggatttccaagcactgcctctgccatcatctgcacgaaggagctagccagatgaacggctcccccatatttgaaagccagcagaagatcccgcaatgatcccatattcacatacacggcacgggcttcctcaaaagaggggagagctaccgcgcagcaacggcataatccggacgggatgaaggaaccctccgccggttccccgcagacggcacagaagggaggctcgacaggcacgaaacttccgcggcagtccggacaaacatggcagccatccaggccgccgcggccgcataactcgcagacaaaaggatacacccaggaaagccattccctgacaaccgacctcagcattccccgcacggcagaaagttgaaagaggctcctatcgtccgcccttcccatcgggggaatcggcgtcctcctcttccggcatctcttccagaagcttgtctatggtttcaatgaaacgccacgggcaccgcttgcgctggtatttacgccacagcacatcacgcagggttacccagtgcgcccgcgttaattccacgtgttcccattccacatcgtcacgttccgcacggcccaccttgggggcgcactccagcttccatttgccggcatggtggcatgccctgtacaccagggtcccctcttccgtgcgttctttccacgtgtgaacttccatggaggcgagtgtaaggaagaagcgtttcgggtaaagaggaattttttctagtcatccgcccttgcgcgattagtatggctccgtcatgaacgacactgaaatgatcgaatgccgcgagcctgcccttcaaatgcagcgcctcatcgccatcatgaaacgtctgcgcgcgccccacggctgcccctgggacgcggagcaaacccaccattccctgatttccaatatgatcgaggaagcctatgaagtcgtggacaccattcagcggaatgactggacgcagctgagggaagaattgggcgatgttttgcttcaagtggtttttcatgcggagattgcccaggaaacagggcgtttcgatttcaatgacgtggctgcggaagtaagcgaaaaactcgtccgccgccatccccacgtatttgcccagtccaaggcggacacgacggatgccgtattagctcagtgggacaagatcaaacgccgggaaaagggggcggaaacaaccccatacctgcatggaacaggcaaggggctgccgcccatgctccaggcatggaagctccagaaaaaagccgccaaagtaggatttgactgggcggacgcccaaggagcccttgacaaggtgaaggaagaaaccgcggaatgcggggaaattctttccgcaccggaggaagacccccgcgtcgcggaagaattgggggatcttctgttttccgtagtcaacctgtgcaggaaaaagggaatcgacccggaaacggccatggccggagcaaacagaaaatttgagcggcgtttcaacgaaatggaacggctgcttgccaaagacggtctttccctggaagaagcttctgcggaggccatggaggcacgctggcagcaggcaaaatccgcccggtaacggaatccggggtcaggccatcatgtccatgttcgggtctttccaggccggatcatatcccttggcatagctgaacacatgcttgtgcatgtattcgaagtactgctctttctgcatgggggtgagccgttcccagatggctacattcaaggcacggcataccttctgcatcattttcagggtaagctggcgcccctgccgggctttttggacctgcttgtgggtaagctgctccggagaaatttccaccaggtcgtgattggtcagatgccagcgcttcatcagttcatccaaaggctgttctccgtggttgcgtccggttgctgtggcttcctcgtccatacgccttccttcgtgccctatttccgggaaataggcaatacatgattgccccatcagcactttttttgcatttccagttgcccggcgtccggatacatggttcaatcccgctccgttgcaataagatgattagcgagaaagaggaattactggaatggcgcaaacgcgccgccgcacagcccgcgggacgggtagtcctggatctggaggcagacagcctgcaccgctatcaggaaaaaatctgcctgatccaatatgcggacgaaacgggttcctgcctgattgaccctctctctatcgaagatatggggcctttctacaactggctgaaagaaacggaagtctggatgcacggagcggactacgatatgagcctctttcaaaacgcctgggaaacgctgcccgccatgatctgggatacgcagacggcggcgcgcctgctgggcttccgccagttcgggctggcagccctggtggaacacttccacggcatcaccctgagcaaatcttcccaaaaggcggactgggcgcggcgccccctttccccaaccatggtcacttacgccctgaacgacgtaaattacatgctggacatggcggacaaactgacggccgccctccgggaaaaaggacgcatgggctggtttgaagaaatttgcagacattccatggaacgcgcccgggaacgccatctggcaggccatcaggacccctggcgcatccagggctgcggcaaattgaacaggaaggggctggccgccctccgggaaatgtggacctggcgtgatgcggaagccaaaacgtgggacaaacccgcgttcatggtttgctccaatgctgacctcatccagtggagcgtggctctccaggaacagcgcaccgtggcgcccccgccccgttttcatgcccacaggcgcagccggttcatgaatgcgctccagaaattctacctgctggatgaagaagactacccatgccggccccgcattcagcgccggcaacattccgaccaatttgaggacaatctggcccgcctgtgcaaactcagggatgaaaaagctgaagaactgggcatggaaggctccttcctgattacccgggcctctctggaagctattgcggaagacagggaaaaaggcgtttccaccctgttgaactggcagaaggaagccctgggtttttaaacggtcctttctgcaaaggaaaaacatccggacggaagcaccaaggcccggaaagtccgttgtccccctctttccccattcacccagcatcatcgcccattcatcccggacggccaacacaagctttctccctgaacattcccggctttctggaagcgttctccgctcagggcagacaggaacagaaatcttcccccgcaaacgccgtcttcccctgcctgtctatttacattgagcggaagacagttttttctataatgcagggcagttcccttcctccatgccctccaaccgccattcatacatggtcctggcaatcttctgcgtctgcgcccttgccatatgcgccttcctttcctggcagaaccaggagaaaaaagaccggctgtcgcggcagtacgcggaattttccatgccccagacctcgaagggaagcacgcaagcacaacagaaagccctgcttgaaatacttagcagagaacagaaaaatatttctcaggcttccccgcaccgtcaacaggcggcagaaccgccgccccgaagccgagaaaaaatcttttcccccccggcagggcatgctagggtggcagacgatgaatcatgccgatttagaccagttgctgatccttcaggaaaaggatgtgcggatctccaaactccggaaggagctggcttccctgccggaacagagaacgcgcctgctgaagcagatggaggccatcaagcagaaggccctggccgccaaacaggaagtggcaggcattgaaaaaagcatacgggacgtggaggccgccgttgaaaccaaacgcgcctacatcggcaaaatgaaaacccttcagtccaacacccggaaaaacgaggaataccagatgtgcatccaggaggtggaaaaaacggaagccgctattgactctctggaaacctcagagctggaattgatggagcgcctggaaacagcaaaaacggacatggagcagaaaatccgccgtgcacgggacgcccagcgtgaactggaggaaacgctcgcgcgctttgaccggacggcagagacggacaaggagctcctgaaccgcttgaatgcggaacgcgcggatctggccgccgccgttccggaaaattccctgggggaatatgaacggatgaccagaagcaagggggttccggtcattgtgccaatggatgaaaaaggccattgcggcggctgccacatggttatcacggacaacgcccgcatgaaagtgctgggcggccacgagaccgtttactgcgacagctgccaccgcatcctccactgaaggagtttccaggaacgccgccgggcttgccatgaaatccagatcggaagaatttgaagagtgggggacggaagtcatcttcggccgtgccaagggattccgcgctgccatgatgcgcatgatcctgcgcggcgcctcctggctgttcaggctggtggttctggcacggctgtatctgtttcattccagcatcgccaggcaggccaggctgggaatgctggtggtcagcgtgggcaacatcaccgtgggaggaaccggaaaaaccccggtggtggaactgctggcccgcacccttacccggcgcgggcgcaaagtagccatcctgacacgcggctacaagagcgcagagctggataaacctcaggaatggagggacaaggacggcaggctgccggagaatcttcccaaaatcgccagcgacgggaaaacgcgctacctgggccccctgcattccggagatgaacctttcatgctcgccaaaaatctggacggcgtggcggtgctggtggataaaaaccgcatcaagtccggcatcttcgccattgagcacctggggtgcgacaccctgttgctggacgacggcatgcaatatttgaaactggcgcatgaactggatatcgtgctggtggattgcggcgcgccctttggcaccggagccatgctcccgcgcggcaccctgcgggaacccaggagcagtctggcgcgcgccagttacatcatcctgaccaaatgcggcggaaagccacaggatgagctgatctccgccatcaggaagtacaatcccgtggcggacatcatcgtgagcgaccacggcccccggtatctggaaaatgtgttcacgggggaacgccttcctctggaggccctccgggggaaatgggtggcgtgcctcagcggcatcgcacgtccggaaagttttgaaaactccctgcgctccctgggcgcccacgtggaaatctgccgcaggtttccggaccaccactggtttgaacaaacggaattgcaggaattttacgaccgctgcgcagaccgggccatggacatgatcgtaactacggagaaagatgccgtgcggctggaaaaaccggaggaaaacccggaggtccctatctatttcctgcgcattgaggtggaaatttaccagggccgggaggcatgggaacgttgtgtagaccgcatctgcggaatttcaaaaccgcgcccacgggatgaatggatgccttcttcgtccctttgacacggttcacgtttcctgaggttttccggaaattcacctcttttatgcagagaaggccgcttgacttgcccggaaaatcgtgtgaaacaaaaaggcagtattttcccatgaaggcatttaccatcacctccattctggctgctgcgtgcctatttccgtcctattcgctagccggagctgcagcagaaaacaagattcaggctgccccaatgcaaacggcggcagacattcccaagcaggacccccagcttatccaggggaagctcgccaacggcctgacctacttcatccgcccgaatgcggaacccaagggccggttcagcatccgcctgcgcgtcaacacgggttccctgaatgaaacggatgacatccagggcgtttcccacttcctggaacacatggttttcaacggaagcacccatttcaagcgcggggaaatgattcccgccatgcagaaagaaggcctgggcctgggaggggacgcaaatgcgtacaccgcctttgacgaaaccgtgtacatgatggacgtgcccagcatgaaggaatccaccgtggacctggctttcaccatcatgcgggattttgcggacggagccctgctggaagaaagcgccattgacgcggaacgcggcatcatcaccagcgaatacaaggtgcgcgactccgcttactaccgggtcatgaaggaagtcttttccatcatgctggacggaacccgcattcccgaccgttatcccatcggcacgctggaagtaatccgcaccgcgccgcgggaaaaatttatcaactattatcggacccactacgttcccagccaaatgcagctcgtcatcgccggggacatcacaccggaacagggaaaagcttgggtggaaaagtattttggctccatgaagaaggacaactattccttccagacggaccggggcacgcttaaaacggctacggaaaccaccgcccactggattaccaacaaagaggccaccagcacggaagccagcatcaacatcgcccggccctatgtgaaaaagccggataccgtcgccaaccgcaacaaagatatccccctgaacgtggcttacgccatgctgaaccgccgtctggaaaagatggcgaagaatgcggactgcccctttatctctgcggaaggaggccgcatggacatagtggaagcggcggaagtggactccattcagacccaggcggactacaagaattggaaaccggctctggccgccattgaacaggaactgcgccgggtcattgaattcggcttcaacagggaagaactggcggaggcccgcagcaacattaccgccgccgcggaaaacgccatcaagtcctgggccaccgccaagtcggaagacctggcttccgccatcgcccagagcgccgcacggaacaaggtcttcaccacgccgcaggaagactgggccatctccagggaagtcgtggaaaacctgacgcccgaacaatgccaggcagccctgaaggaagcctggaccggagcctttccccgcgtgatcgtcacttccaataaggaaaacccccagggaagcgccgaaatcatgaacgcgtaccgggaatcccagaccgctaaagtacagccctaccaggcggacagccgcaaggatttttcctataagttcggggatcccggcaaggtgacggcccgtacggaaaccaccgacctgggagtcacccagctcaccctgtccaacggcgtgcgcgtcaacctgaagcccacggaatttgacaaggactccatcaacatcacctttgccgtggacggcggggaactgagcaggccggaaaaagcctccgggctggaactttttgcgaatgccgtcatgaacggcggcggtttgaaagaccactccaatgacgaactggccgccatcatggcaggcaagaaggtaggggtaggcttctccatgacggaccgcttcttcctgctttccggaaacaccaacagggaagacctggaaacgcaactccagctccagacggcctacctgatgcaccccggttaccgccaggacggcgttaccctgctccgtcgggccattcccatgatttataacaagatggaccatgaagtgcagggagccatgaagaagcaggtaccggccatcctttacaggaacaatccccggttcaccttccccactcaggaacagcttacctcctaccaggtcaaggacgtgcgggactgggtggatgccccgttgaaaaacaactacatggaagtgaccgttacgggagacttcaggacggaagatatcatccccctgctggaacgcaccgtaggcgcggttcccaaacgtgcggaagctccggcaacgctggatgaaacgcttcgccatccggccatggcggacttcaatttctccaaggacctgacctatgactcctccattgataaaacgatggtctgccttttctggaaaacgcccggaggagaaaataaaaagctggcccgcagactgaatatgctcaaggccgtcttctatgaccgcgtattcaagggcctgcgcgaagacatgggggaaacctactccccttccaccggcctcaatatcagtgaaacctatccggacggcggctacatcatcacgatgagttccggcgtcatgcgcaataaggaggccgtgcgcagcgccatcgccagaattgcggacgacctcggcaagggaaatatcacccaggaggaactggaccgtgcccgcaatcccattcttaactccatggaccgcgcccagcgcgacaacggttactggacatccctgctgaaagactcccaggccaagccggaacggctgaaccagcagagggaaagcattccggacgtaaaagccatcaccgtggaagaggtcaacaaacttgccaaagagatcttcggcaagggagagcatctcaacctgaacattctgccggatcacccggctgcggaaactccgcctgctgaaaagcaggcggacaaagccgactctccccaggccgccgtctccccggcggctttttgcgttcgcgccaccgtcgtgaagacggtaaaaaaagactccggcaagaatggatatgccatcatcatttccgaagaaacagcttcaatgccggcatggaaggccgtggcggacaaactggctgaaaaacacggaggctccatcgtcaccgtgaaagattccgtattctccaagctggacacgctcaaaaaaatggctccacgtttcatggccgtcgtcgcacgcccggaggaaatagaccgggtgctggtgaatgacctgcaccgcctgagcctgcggctggacgacgacccttacggggactgtatctggggcattgtcacggggtacaccccgcaggccgccatgagaatagcctctgaaacgaagcctctcgtcatcagccgcgccatgggaactaccaacgtggattcctcccgattcaaagacagcatgagcatcacggactggcagcccttccaatacctggaacagcatggctccaaggacaaggtaacgccggctttctacacgaaaggcctgaaagaacaggacaagggggatgaaaccacgctgggcgtaacgcccaagcttatggaatactggaaacgttattccccgcagctcttcgtaacggcctcccacgcaacccagtttaatctggaaatgcctttcggcaagggcctcatcgtttccggcaacaaccggttctacgcgctggacaaaaaacagttcagggaattcaccacttttttgcgcggcgtgctcttcaacggaaaggaagacgacctgctctccttccttaatagaattaaagcgccggtgattgaaaccaggccggttccggcagtctgggtcgcggcggggaactgcttgatcggagatgccaagaagacgaaaaattccatggctgtcaccgccctgagccgctacggtttcaaccagctggtaggctacaccgtcccttcctggtatggcaagggcggctgggggacgctgggccttctgttcagcaatcatgacgcctccagcctggcggaagcctggtatttgaacaaccagttcattctggatgagaccatgacccgcttccccaagctcatggacgtccatttcaactccccggatatcaatggaatcaagaatgatccggactttgccaggggcatgaactccgccggatacggcatgggcaaggaccagctggggcttatccacgatcgggataccgtggccttttacggagaccccgcctggacggcgcgcctggacgaatcccgggctccgtccccgtggcatatcgactggaatgacccggcagatgcctccaaagggttcaccgtcacagccaacaaagacgccaaaggtcgcctgggagtctggttccccaatcggatcaacgcaagcaaggccaccgtcaccattggcggaaccgccactcccattgaaaaggcaggcctgctgaccaacgacttccttctgctccgggaactggaactcaaaaagggagaaaaagccgtcgtggaaatggaataagcgtggaagaaaaacaagttgcaggaatttttccccttccgtcggcggccgaatatccggccgccgctctttttccatagacaagcagcctccaaacatggatactcccggtaatcaatccaccctatgactgattactccattttctttatcatcgccgtagtagcgacgggcgtgggagcgctcctgtttctcctgtccctgttcgggctgggggaacatgatctggactttgatgcggattccggcggagcggacgtagggttgctgtccatcaaatccggcatcggcttttttctgggcttcggctggggcggtgtgctcgcccagggtctggactgggggatggccgcttccctggcggcggcttttttcaccggcgtgctgatgttcctgattatcggcatctccatgcgtttcattatgagccttaaatcagacggcaccctgaattatgaaaccctcaagggaatgaccggctccgtttacatcagcattcccggaaacctccaacgcggcggacaagttacaatcgcccatcccagccagctgctgtacctccctgccgtccaggaaggggaacatcccttgccctccggaaccccggtggaagtggtagccgtcactgcgggaatcgtcaccgtcaaacctcttcattaacaaacaccccaatcatcataccccaagccgactatggacaaaatcatccccatcgccattctggttctcttcatcattctgaccgcttcctggctgttcagccgctaccgcatgtgccctccggacaaaatcctcatcgtcttcgggaaagtaggcacaggccagcttaccaaatgttaccacggaggctccaccttcgtgcttccggttctccagtcctatagctacctggatctgaaccctatcaatattgacgtgcccctccagggcgccctttcctcccagaacatacgcgtggatgtgccctcctccttcatcgtgggcatctccacccttcctgaaatcatgcagaacgccgctgcgcgcctgctgggccgctcccgggaggaaatccgcaatttggccgcggaaatcatcatggggcagatgcgcgtggtgattgcctccatgaccattgaggaaatcaattccgaccgcgaaaaactcatcaagggcatcacggaaggcgtggacgtggaactgcacaaagtgggcctccatctcatcaacgccaatatcacggacatccaggacgcttccggctacatcaacgccctgggcaaggaagccgctgcgcgcgccatcaatgacgccaccatcaaggtggcggaagaaaagcgccgcggggaaatcggcaaagcggaagcggaaaaggaccagaccatccaggtggcgaacgcccgcgccatcgccattgaaggccagaacgaagcccagattaaaattgcggaatccgccgccaagctgcaagtgaagcaggcggaggccaaaaagctggcggaagtggcccagaaggtgcaggaggctaaaaccctggaagaagcctaccaggcggaaaaagaagcggaattgaagcgcgcggaacgcgaacgcgccacgcaggaagccaacatcctggtaacggcccgcattgaaaagagccagcgcgaagtgcaggcccaggccacggcggaagtactcaaactggaacaggaaggcaaggcgcaggctctgctcatccagcgcagggcggaagcggaagccatccgccaactggcggaaggcgaagcccaggctaccctcctgaagaaaaaggcggaaggggaaggcatggaaatggtgggacgcggtgaagcggccgcgattgaagccgtgctggaaggcaaggcccgcggttttcagcagatcgtccaggcggcaggttcttccgaggccgcttccaacctgctggtgacggaacagcttaccaagattgtggagctccagtccggcgccattaaggggttgaaattcgacaaggtagtcgtcatgggcaatggagggaactcctctgtgggaggattcgtccagaatctggtaaaggatacgctgccccttcatgaactcggcaaaagcgtagggctggaattgcccgcttttctgggcaaacccatggaagggaaaaccgcagattcctcccctgctcccgcagccgatgccccggcggcagataccgcaaccgccgccaacccgaattaacccctccatccccgctttcctgacggcaaccgcctcccccccggatagacagggcagatctggacagcattgtccatattgacgcaggacgcatgctgcaatggcaaaatccgttccccgtcaacagggaaacggctcttaaaccataaagggaaaagcagaatacctgccttcaaggctaataggcaaaggccggcaagtattgtgtcctttcacctgcccggatgaacagaaaaatatcggcgctttctgctttattcccggtaatatcgaaagcggcaagacaagcatgccctccccaggagggcggtaaacgccatgttgatttattatcctgcaactgatgttttcatgatatttttcaatctgtaatgaaatgcagacttcttatggcaaatagcgttattattcgataatacaattattctatggcataatataacaaaaagctataacaaattactgcttgcaggttcattgacaagaaaccggaagcaggttaggatacggctttcaacctctcttcgactaatgaatatcaaatccgcccttttgacgctcgccgcagccctcgctctctcctcctgcaatacgatcagcggaataggaaaagacgtggaagccatgggaagcaagattgacagcgcctcccaggccaccagcaagtccatgcaataaggcccgggaagtgccggacgctgctttgagccctcttttaatggaaaagaggcagtactttgcttcctgccattctgccctgaatggcagtcatcctcatgggattcccaacgaattgggatctacatacttgactaaccattgtttcacgaaaaattcatttttcattgtcaatagataattaattattgaagaacaaataactagtataaatttcgtttggttaggatcagctggaatcaattgaactccaggtttctcagcatgtctaatacctcctgaatcaccgcaatacccatatagctgattaagagcactagaaaaggcaggatgtaggttgttatttttttggagttctttgacacatgaagtaagtgttgctgatggttcatttgttaaatagcgaacacatgcttctactgctgagatagactctttgatagagtttttataatcaggatttttcctactagagtaaaaatccaaagatttctttaaatgtatttttacttcttctattggagagctgattgccgtatcaatagattcaatttctatctcatctgttattttagtaatttggccattaataaatcggaatcctactaaatatttttcaaataataaatttattttatcaatatattcttgtgcatacttcttattgtatgaatcaacatgagtaaaaataatttccaaagaatcaaataattcaaaaaatgagaatttctctaaaaattccaatctccaaatagaatatattttacttttgatagaaccatcttcataataaaatgaagagtaagaatcataagtgtttcccataatttctacccatatgcgtttaagcatgttatctatactaccataacctaatatacgaaatacatattctgaaattatattccaaatagagattctagtctgttgatccaaattgtctatttggattatggttcttgctggtttatatccgtaacgctctgaaaatgatgccatatataataaaatttatggagttattttcttccttcttctgcctttgtcaagacctacctttctcattctacctaatagcccagacgcatcttcaaaaggacgattaactcaatatactttcgtttaatcctcattcaattttatatcattaaattataaggacaattttctactcgaccaatatgggtaagaaaattgtagccacaaataattcccaatacgctgaaaataaacgcgtacgaactaataaaaacacgacaaaatttccatatcaacacaaagacttgtgttgtcatcaaccaagtgatgatatggaaaaaactaagctcaaacacatttctctctatgagttcttctccaaatttcctaatgaggaatctgctcggaagtattttgagcttaagaggtggaatggtaatgtccggtgtcctcactgtggtagacataatattaccgaatgtaaggatcactctccaatgccttacagatgtaggaaatgcagaaaatttttcagcgtcagatttggtacaattttagaggaatccaaattgcctcttcacaaatggttgatgtgcatgtacttgttggcaacttccagaaaaggtatttcctccatccaggtttctaaggaattaggagtcactcagaagagtgcatggttcctctgtcacagaataagggaagtttggatgaaagataaaaaggagaagttggacggtattgtagaagtggatgaaaccttcatcggaggaaaggaatccaacaaacacttttccaagaagctgaacaagggtagaggctcggtcggtaaattgattgtcattggagccaaacagaggaatggaaaagtgatcgtaaaacacattgacgatacatcagcttataatttacagggatttatcggaaaacatgttgagaaaaaatccaatgtgttcacggatgaattcaagtcttacaagggacttgtaggttttgttcatgaatccgtcaatcactcagggaaacaatacgtccatggaaacgtacataccaattccattgagagcttctggtctctattgaagagaggttactatggcgtttaccactatatgtctcctaagcatttgaagaggtacatccatgagtttgcctacaggcataatacgtctaatgttgagacaatggattttataggagatacgattatcaaaatgattggcaagagaattatgtattgtgatttagtgagttaagagtaaatattttttatgaatacaattaaaaaaataggaatatttttttctacattgattttccgaggaaaatggtctaatgaaaatggcatgtctgtctatttcccatataatgacgatatagcaagatctatagcatctctctttataaaaaaaaatggaggtactattgatcggttaaaattaaataaattgctttatttcttagagacgacagctttaaaagaatttgaatgttccattattggaggaaagtatgtttcattcgaatttggtccagcaatatctcctgtagcagatagtttaaaatacaattcttggggaaatattaaatgtgaagacatcacagtaaccttgttaggagaagttgatgattcttgcttatctgaatggatcaaggaacttgtagatagaatttacaatgaattcggacatatggggacgtgggacatttctcgatactctcatgaaagagaaaattgtcctgagtggattccaaccaaaaggggcgatgtaaatgatattacaattaaagatattgttggtgaagctaccagcgatcttgaagatttagctcgagatctccatgttttcaataaaatccactaattcatatgtatcaggttggagatgttttaaaaaacagaaatgatatgggtcattggtgggtcattattgcttgttgtcctcttacaaatgattttttactaacaaactggacaacatttagccctaaaaaagaacagacttgtattctaaaaattggagatcacccttccataatacatgattcggctatcatgtattattatacacgaacttttactgaaacacaattggatcaacttattagcaatgaaaattggataaaattatctccagtaaatagcactatacttagtaaaatacgacaaaaagcgttagaaacaaaaaggatgaatccagtcttgcaatctcgtttcaaaccctatttgatatgattcttgtgacttccatgggatcaaccccaagtacctgacagatcaaaatgacctcagtaaatgtcagatacctttcaccggactcatatttggaaacaaatgtccgggtgttatctagcagtaaagagagtttgagttgggaatatcccttctcaatccgcttttgtcgcagaagcgttctgagtgcttcttcaggcacactgctacgatctcttttcattaccgcagtatagcgtaatttttaaatcccccaaattaggggatttgttgtttacaggtgtcatagttcttgttatctatatgaccgaatctcccaaaatgggggatgacaatgaataagaactatgaagacattattacttggaacagtcctggcatccttggtactgcttgcctcatgcagcaagtcatcatccaatggagatggaaacaattcagaagctccattaacgctggaaggaaaaactcttacaggaggcatgtatgtagactatcaggaaggtgatggttgggaattggaggcaaaggattttgttttcagtaccgggactgtcacgtttggcgctgtcgaatatgatgccaatgaccatgagacaactaggacgattacaggtaattatatctttgaaaaaacgggaactaatgtaggaaccttgcagattgagtcaaattgggtagggtttcatcttaatttgacatttaatgataataatgttgccgctgaaggaacgatgaaagagaatatgggaaaggaattacctgcaaagggtacatttgataagatgtaatttatttattacaaatatattacgaaagacgctgactaggtattctagtcagcgtttctgtttaagctgttcaccttcagacaaaaaggaaatgacgaaaattttataaaatagtatggttagtcaagtatgtagatcccaacgaattggcaaggttcggctccatcctgcatggaacacgccaaacctttgcggccatctgtaaatcaggacatgcgggcggcagcacattttttaccggaaagccgcttcatccacccggatgaagcggctttcgtccaaggtctctacatgacctttttacatggcccggctggtggaacgggcggcggaattaatgtcgctgccgaccgcttccacatccttgcccaccccgcctatcgtattgcaggaaacgcaccccagaagggtggcgatactcagaataatcaatttgcttttcatcgttttattggaagagttccgagtaatcagactctattcctccgccccccgttcaaagaaccggcaatcatgccacaaagccccctgtcattctccgttcttgccatgcgttcccaaaacacttaaaaaacatgcgccaaaggaaaaaaatgccgggcggacattccgccccattaggaaccattactatttactaccaagatgattaaagtagccatcgtaggatacggcaacatcgggaaatacgctgtggacgccttgcgcgccgctcccgatatggaactggcaggtatcgtgcgccgccccggcagcgaagctgtacacggcatcaagaccgtaagcgacgtggaggaactgggccatgtggacgcggccctgctctgcacccccacccgcagcgtggaagaaacggctctgcccctgctcgcccgcggcatcaacacagttgacagcttcgatattcacggggacatcgtggccctgcgccgttccctgggagcccaggcaatcaagcatgacgccgtctccatcatttccgccggctgggatcccggaacggactccgtcatccgcaccctgatgctggccatggctcccaaaggcatcacgtacaccaacttcggccccggcatgagcatgggccacagcgtcgtggcgcgttccaaggaaggagtggcggacgctctttccctcaccatccccacgggttccggcgtacaccgccgcatggtttatgtggtgctgaaagaaggcgccaaattctccgacgtggaattcgccattaaatccgattcctacttcagccatgacgacacccgcgtgctgcaggtgcccgacatcgacgtgctgaaagacatgggccacggcgtgctgatggaacgcaagggcgtttccggctccacgcagaaccagatgttcacatttgaaatgcgcatcaacaatccggccctgaccgcccaggtcatggtggcttccgcccgcgccagcatgaaactggccgcaggctgctatacgctgccggaaattgccccgatggattttctgccgggcgaccgcgaagaattgattgcccagctggtctaacccggagcattccggacacacggtatcaggggcgctcctgccgcccctgttctgcgggccttcctttatcctccggtcctcaaccggaggatttttattgctccacaacgaccaacctgccatggacggccttcacccgggccggagtacgggtccgttccgtccagtcccacgctcgggccatgtccgcccaaaaggcggcgtggggagaatccttttcctctgacaaacgcgccggagtgggcacgaagggataaatctgcacgggaacgtttttttgcccatgaaccagagcttgttccaccatggtataaatctcctcaattccggaatcgctcatcgccagacagccgatggaaacatcccgtccatgcaccatgatgaagcttcccgtccggttcagggaacggtcataggcattcggatacccgatgttgaaagacaaatggtaattgctccggggattgagcccggacggttccacttcataaaaaccttccggtgtttgcctgtccccttccttctccttggggcccagttttccggaccatgcggcaatcggatagcgcttggcaagcatgtagcattccgatttgtccggtttcacccacagttccaggacggagtcttcctttacggcccgtaaaaacacaggacttcccaccctggcgccgcacggctccagaaaggaattcagcacgggcattacccgtttccgcgcgatatccgcacggttggaggatttttctgcacatgccatattgaaaaccgctacggcggaaaccagcagaaccagccccagcaaggacaggactacattcttcttcataaatcatctataatggcggcttttgttttgacaagcagaaaaccggccggttctctccgaagaaggaaaaggaaaaaacggcggaaaaagaagacggaaagaaaagcggttcctgagaaaggcgcccttcccgaagctgtccccggttagaagccatgtctgtgctggaaatgcaggctccggagaagtattatcggccctcagaacatcagcggaagaccgacctataaacgccatggaaataaacaaccttcttcccatcactacacggaaggaattaagaatatggctggaaaacaaccacctcacttcctcctgctgctgggttctcacaacgaggaaaccttccccacatgccctcctttacctggatgccgtggaggaagccctgtgcttcggatggattgacagcacccgcaagaagacggcctccggtttcctggcccagcgtctcactccccgatccagaaagagtaaatggtccgaactgaacaaggaacgcgtccgccgcctgaccaggctgggactaatgacgccccacggcgaaaaatgtctgccggaaatgaatccggaagcgttccgtattgacccgtatattttacagctccttcaacaggatccgcttatttacgccaattttctggcgtttccccggctataccgccatgtgcgcctggataccattcaaattaaaaaaaaccagccggaactgttccgcaagcgcctggaaaaatttctggagaatacccgtgaaaacaggatgtacggagaatggcacgacggaggacggctgctggaaaaagtagacgccaggctcccgccatttccctgccggacgagccctgaccctccagagccgctccggaacaactccggagcggctctggagggtcaggaggaaggcctttcgggggtggggccccctccttgtgttttccttcttgttagaagtcgtagcggtagccgatgcttccgttcagcgcgctggacccgtcacggatgtccgcgttcccgttcacgtagatggttcccttcgttcccaccggcacgctcagtccggctcccagctgcagcgccgtcgttcccactttcgcccccctcacgctttgcgcaaagccggggttgcccagcagagagacgttcgtttcccctctccggtctcccaggtcctgcgccgcgtttacgcggatttccgccagcgcttctcgtccgaagatgttgctgcccaccaggcccatccaccggccgcccagcgccagcgtccccgtcgtccagtcctgcctgccgacgttcaggcccgcgttgcccgcacccgtttcctcatagccgtccatccgcgtcgtcaccaccgaggcgttgaacagcggctgcagcacgctgctgcggttttcgttgaggtatacgtcgtaggtgagttcatacatcgctccaaagccccacccgctggtgcttccctgcgtcccgtagcttccttccccgtagttgaccgtacggttgagtttcgcgtcgttccaccctcccgtcaggatgagcgtgtgcgcccagcgcctgtcctggtagcggccgaagaggctggcgtagtagctgtccaggtgcccgtcggcgctgtccgccgcgctggccgtcaggtcgccgtagtcggccgtgaaggccgctcccaccgtgaggcggtcgctgaggtccgcgtccatgcctaccgtgcctccccaggtggtgagctggtagccgctttcatccccgcgggtgtcgagcttggcgtaggagcccgtgccttccatccacatgtggaagcgggggaggtcgtcgttgacgtaggccgggttgacgcccatgaggatggtccggttcctgatccagcccatctggtcgcgcagggcgtccctctgcgccgtcccaagcgcgttgaccgtgctccctgccgccgccgccagggaacgcctggctgcggaaggattattgagcatatcgttattgagggcgcccaggaaatccgtgacggcctggtctatggaaccatgcctggcagcatcccaaagcagattggcgcccgccatggaattggccgtatccgctacgccagcataaacgttatctgtctgttcttccgctttcagaaccaccttatctccttcctgcaccagatgggcattcttgtaataggtgaggaaaaggcctccgactgtcagcgtattttctcccaggtcaatcgttccgtcgccggtgagttccatcagcgtaagttccatcggattacccgatttccaggtgatattgacatccgggattgaggtgacatggaaagaggcgccatcttcaatgacaacgtcgccggaggcctcaatgaagctggcggtcatgtcggcatcagtattcaaggtgaaggtggtggaggacccgctgctgaaggaagcgttctctacgctcagagtggtattgaccgccgtcagggagttgtcgctggcctggatggtcaggttgccgctgttgaccagattaccgtaactgagacgggctccgtccacatccgccttgccctggagaaccagattccctccgctgattgtcagaccggtatccgcgccggagctgcgcaaaacctgcgttcccgctccggaaacatccagcgttccttctcccagcgttccttcatatgtatgcgtctgaccggaagccgcctgaatttgcaaagtctgcccattcagttccaaggaaccggagccgttcagtccgccgacagagccgtctgcctccaggctcagggaaccgtccaggtccagcaccacgccggaaagcgtactgtccgcagccagccccaaagaggcgccttccgcaatagccagcgtaccggttccggcaatttccgtatgggaaaggccgtcggtagcgcctgtcagcgtcaatgttccggaagaagcgatatccagctttccgccgttgtcgccgcctgccagcgtccgggccgtcgcgcggcctcctactccaatcaccgcaggagagtccgcatccgcggaattaagatgcagagcttccacgtcagccgtaccgttaagctgaagcgttccttcttccgcaatgatatccccggccagcgtcacattcccggacagggtgagtttgttcgctcccgttttgacgaggtccgtgttggccgcagcaccgttcaggccgctgatgtccccggcaaaagaggtatccactcccgtgccttcatggaagaggttgttttgaagttcgatgcttcccttatcctccgccgtattggtgacgatcaggttgcccgtgcccgtctggcccgggccagttcccggtgcggtcaggtttttgatcaccatggaaccgtccgactggacataaaggtcctggtccacaatgacggcctggtagaaattgagggactggtccgtgaccggattgtccgcgctgcccgtaccatccacggaagacacgtaaaccagatccgtatcaccggagaggacgatgctgcctccgttgacgcccacgatgccgaagcccagcgcagcaaaaagcgggttagccgtcacgtggctcttaagcgtttcaagatcctgtgcaaaaccgccattggtcagaagtatctccagatttccgcccgccgttttcatggcatccataacgctggtgaggtccagcgtaagcgtggagccgtctccaaaggagatgctgcccagattatcccccgtgccctcaaactgaatcagaaagacctctcccgagaaggggtctccggaaatattgcccgctcccaccgcaagactgctgtccgtgccgttcaccgtccagatggaaccctgcttaagtccggtgagctgcgttccggcagaagcggtgacaactgaccccagcccggcggcatccagacctcccagggcaatattgccggaatcggcaaccgcattgacatggaccttgtttgtatccgttcccgcgtagctcccggcgttcgccagcgctccggactgaataagtatattagtggcggcggccgctccggaaaggtccagcgtgcccttggccagcgtcagcgtccccgtcaggccgttggcgcggtcccccactgcaaaagagccggaagtgctgaccgtaagattgcctgctccggcaatggttccggcccaggcggcgttgtccccggttccgtcgcccagctggacagaggaattttgggcaatattcaactctcccgtggtcgtatttgccccggtaagaaccagcttgtcgcttccctgaacgctcagggaggccgtatcaattacattcccggcataaagcaggttccctgccgtacccgtgtagttgacgcggtaggttccggctcctcccagggaaactgccttgatgaattcacccgtatccagcgtggccgccgcaccgccgttgccaaaggaaaggatggcattcccacggccggaatgcaccgttcccgcaaaaccggtgagatcccccgtcaaaatggccgtcagagtcggatctccggccgccgttactccgaggttggcccccgcctcgctcgtcaggcttcccgccagaatcagcgtctggttggaattgccgttcagccatcccccagcggccatcacatggatatcggcattaacgggatcggcggcggaattgacaaaaaagccgcgcccatccagttccagcctggcgctgccgattgcagcggcattggcaaagccgacttcattccacgcagcgttggtgccgttgcccgccagtctcatggtaccggtaaagccgctgttgtctccggtaacggaatagcggccgccgccggggaaggttcctccttccttcttcccgagaaccagcgttccggctccggtaatgcggcctgacagaatatccgtatttacggagttatgggcacggttgtcctgtatctggagagtcgcgttttcagcgatggaaatgtttccgctccaggttcgcgtaacgctgttgtctccgatgttatagaacagggttcctccgcttacggtgatggcgcaagcaaaggttcctccttgtattgtattgatagtcagcatgccgtctccaagcttgacgatatccttgtctcccagttcctgggtgtatgcagcccaagacacatgattgccgttcgtattcactcggatggcatccgtgctggcggctgaattaatgagcccggaaatatcctgcgtggcccccgttccatatgtgaaggtgccccctccaaaaataatcttgttggccgctaccagtcccagcgttccttccgtcgtgcctgccgtattcagcaccagttcccccccgttcagcgtcaccgtaccggtgcccaacccctggacggcattgaggttgagggtgccagccatgatggtcgtgccgccggagaacgtatttgttccagtattttcaatagtcagcaccccctctccccgtttaatgagggacatcggggttgctccgtccacaagggcccctgttcccgtgaacgtgtaggccgtttctctattgttgactgtaagacgcgcggaagaaacatttccttctatggtgacggctgaggtggatataccagccagatcttcaaaattggcggatttggcggcgtcataaacgactgccgtcccatccttgtccagccagacggcagaacctcctgccgccgtccagatacccgcatttcctccgttccagttgagggcttctcccaacgccttgactcgcaggtaaagagtgtttccggacaactccagagcgtaggtataatcttcggaaaggccgctggaatcaaaagaaaaattgctggccgtcaacgtaccgaaactgcccgccgtaatcagcctgtagtcattttccatcgtctggtccaccccgctgatcgccagagtcagcgtgccttccgtattaaaggagagcgtacctcccgactggacgatggcggagctggaggaattcagccccgtcaaatccagcgtcagaacggaagacggggaaagagtcatattgcccgcagaggtaagacgggctccggagcccatcgtaatggagttgccgaaggtcactccgccagcaagcccgaaactgagctccccagaggaaaccgtcagcgcattcgcaaagccggtggaagaactgagcgtgagcttgcccactccgctcttggtaaaagcactacggccgtccagcaccgttgcgttggcaataacggcatccgtcccttctccagcggaaatttcgtcaaacccggaaatggaggcgtttgtgaacatgtccgcgcgcgtcacgccgttcaggttcaacacgctcctggtgaccgtatctccctgcccctgaccggaaagagttgtcgttccggtaaaaatggcgtcattgcccgtaatagtcacgttggccagctccgtggtcagggaagtgctgttaacttttcggccgcctgcataaatagaggcattattgaacgttccgccgctgatggaaaggttggcttccccaatcgtcaatgcggaactggaagagtttctttccacataagttcccagagagatttgcgcgccatcgaatgtgccgcccgtaataagtatattggtggaaccgatattcccggtaagtccagcggtagctgttccattaatgtaggagccgccccagatttgtcccgtatatgtcccggacttgaaggtcaggttggtggaacctgtaatattcaacgtgcttgctcccgtttccacccagcttccccccgcaatcatggctgccacggtgccgctgcccaagtccagcgtcatattggtatccgccaggttccaggcagacgtgcttaaatgggcgcccgcaaagattttcttggtcccgtctccggaaaaaacagctcctgtgatcgttgtcgccacgccctgcgaaaacaaactctgggcaaaagtcccccccgtgatttccacggaagcggacgaatgctccgcaatatttgcggcagaacctgaggatgtcgcatcggacaggccatatacattcgcgttgtactggcctcccgtaatgcttaacctggccgtataggcattcgttccatctcccaattgcacttggcctcttcccagaagagcgacggagccgttaaaagttcccccgtccagattcagggcgacattgccgacgatggtcgatttctgccccgccccgcgtgtcgttccagccgttaccagctgggcgaaggtcccgccgtcaatggtgaatgtcacgtcccccgtgtggcggaaggattcctgccccagccctatgcaccagctggaactggggttggagaccgaaataccggcccattccccgccatgaatgttgacggaatatgtccccgtcgtacggtaggcatcattcttgttgccatcccccaccagggaaaaaccattaatcgtgcaagcattccggtctacattgagggtaatgtcggcggacacaatccggtcctggttgctccaccccatcaactgggcatttgtattcagcagggatgttccttccccaatattgattacaaaggaattggttcctccgatggtaacgccggaggctgtgcccgcaacattccataattgcagttttgtataggttcctccctccagattgagaacccggttatagccgtcttcataggtcccgcttgccgtaatgtttgttagataaatatcgccgggagaatccgcctgagtcacgggctccccttccggaggcgtaattgtgtattggccatcggcaaaggaaatcgtcgtctctccattgcccgtcaacgtataatcagaccatgacggagaaatgaaacaggccagaagagcggataaaagaaccaggggcaagcgcggtcgcataacactataacgtattgataatgaataaaattatttacaagactatatacttgttaatagttaacggatttgaaatccggagtcaatgacaatttttgaggccaagccctttaggagcatggaacggcctgaaaggggaaagagagaaaacgggggtgtccgtttcaagaatcggcattattaatattttaatcattatctggactcatttatatcatttacggatttcaaatccgtccggttatttaacctgtttctcccagcaagcgaaccctgcatgcaggaaaaaatgatttcttgtcttgcattcccatgggagtgcctgtataagcctccacgtccccgccgcaaggcagggacggcatccaaggtcatggagcggtagctcagttcggttagagcgccagcctgtcacgctggaggtcgcgggttcgagccccgtccgcttcgccaccttgttcaggaaaaacagccgccttcgggcggcttttttgcgtccagaaaacctgaatcccggaaaacaggctgccccccgggaatgttttactggaaaaaggggccggaccccgatagaatgagggccagcattacaatcatgagcatactttcggaccgtctttccgaggaaatactgcaagcccgccagcgcgtctacaccgttggcgaaccgactcctctccagcgattgaatctgccgggcatcaaagccccggtatacgccaaaagggaggatctggggcccatccgggcttataagtggcgcggagcgtttaattgcatggccgcattgagccaggaagcccgtgacaaaggcattgtggcggcttccgcaagcaatcacgcccagggcgtagcactggcggccagagtgctgaactgccatgccaccattttcatgccgcgctccacgccggaagtgaagcagacggaagtgcgccgccacggcggcaggcatgtgaagatcatgctccatggggactgctatgacgagacggccgcagccgcccatgaatacacggaaacccacggctgcacttttgtccatccttatgacgacctggtgaccatggccggacagggaacgctggcggacgaagtggtgatgagcggagaaggcccttttgaccgcgcgtacgtcgccatcggcggcggcggcctggccgcatccgtggcgtgctggctgaaaaaattctggccccacatcaaggtcatcggtgtggaaggcatcgaccaggcgtccatgaaaacttccattgagcagggacgccgggtgaatctggattacgtggatgtcttctgcgacggcacagccgtccacatccccggagaattaacctatcctctttgccgggaactggttgacgagttcgtgaccgtgaccaataatgaggtctgccaggccatccgggccatgtgggaatcctcccgcgtcgtgccggaaccatccggagccatgagcctggcaggattcctgaaacaatggaaccggggcgaagtaaagccggaggaaaagagcttcgtggtcatttccggagccaatatggatttcacccaccttacccagattgcccggcaggcgggcatcggcaaccatgaaacgcgctatctgcgcatttccatggattccaagcgcggacaggtgcttaaatacctgcgccacattccgcaggatacgacgctggtggatgtgcaatacggcaaaacagagggaaacacccagcaccccgtgttcggcattgccgcttccgatgaagacctggataccatccgcacgacactgaaaaagaaaggaatcgaattcgaagacatcagcgaggacgacgacgtgcgcttccgcatgattcactaccagccggaactgtgtcaacaccccctgttcgtccacattgaatttccggaacgcgctggcgccttccttgacttcatggaacgcatcgcggatctggcttccctctgttatttcaactatacctacaccggggaacgcgtaggccgcgccctggtgggcatggaatttgatacagcggaagaccgggaaaccatccggaaacgcatgagcgccttttccaaaaacattatcaggtccattcgggaaatttcccccgaggctttccagaggattatgggaagcagacagttgacaggcaatcattgacagcccatcatccagggagcttgagaaagattggctccctgtttttcatgaccgctttctcctcccatgattccgcccgtcatcctggcctcccaatcgccccggcggcgtgaattgctggagaaaaccggcattcctttttccattattgtccggggcacggaagaactgaaagaggcttccatgcccccgcaggaactctgcctgcacaatgccgccgccaaggcggaagccgtgttccgggaacatccggattccaccgtcatcggcgcggatacgctcgtttttctggaaagcttccctcttggcaagccggaaaatgaagaagaagccctgtccatgctccggaagctgtccggacgcacccaccatgtctgcacggcggttgccatccgttccccgctgggcatgaaaaacctggccgtgctgacggaagtaacgttccgggagctgacggaaaaagacatccgccattacatggaactggtggacgtgatggacaaggctggctcttacgcgttccaggaacacggggagatgattatttcctccgtgcgcggggatacggacaacgtcatcggactgcctgtcagggatgtgatgaaatgcctgaacggcctgggataccgggcttgacccgtccaggaatccggatactgtctccggaagaaaaaacgcttcccgccccggaacggccttcggaacgcaaggcaaagccccaggcttcaggaacagggtattacctgtctgccaggaatgactccagtttattgtaaaaggccacaggaagcacggcttccagcaaggtcccttcctctacatattccgtatagaaaaccttgccttcactatgcatggcggccaccaggtcgctgcgggtatagggaatcaggaaccgggcgcgccggacacggctttccagcatttccacgcaggcattcagcaggtctccctcaccattcccttctttcacggacatgggaaccaccctgccgctgaaatgaggcgccagcagcgtttccagggccccgcgccgttcttccggcaccaggtccaccttgtttaaaactacgatcatgggcttgtcacccgcacccagttcattgagaacctccagagtcgtttcataatggcgcacggcttccggatcggaagcgtccaccacctgaatcaggaaatccgccagaacggcttcctccagcgtggacttgaacgcttccaccagacggtgcggaaggttgcggatgaagcccacggtatccgtcagcagcagcggctgcccatggggaagctctatcttccgcgttgtggtgtccagcgtggcaaaaagcatatccctggccatgacttcagacccggacaccagggacaggagggaggattttccggcattggtataacctacaatggcggccgtggcgacagcctggcgctcccgttccttgcgctgcgtggcacgctgacgggtcaccaggaccagttccctttgaatagcctcaattctggcgcgcgccagacgacggtccacttcaatctgcttttccccttcccccctggcggctccgccgcctcccttgccgccgccggagcccccgccctggcggtccaggtggttccacatgcgggccatgcgcggcagggaatactgcatgcgggccagttccacctgcagggtggcttcccgtgtccgggcgcgcctggcaaagatgtccagaatgacctcttcacggtcaatgacgcattcgtcaacaagccgttcccattccctctgctgggaaggggagagcatattgtcaaaaacaacgcaatccgcccggcaatccagcgccagctgcttcacttcctgcgcctttccggtgccgcacaggaatttggcgtgcatgtccctggacttgacgaggtgcttccctgcgatgccgatgccgagattggagacaaggtcttccagctcatccagcatggcctgtttttccccagcctcggagggatcgaagtaaatggaaacgagcatggcccgttccaccatttccggtttttcgcggatttcaaacatatagggaacttaacggaattgcttgctggaggtaggctggtaatccttcagagcgaagtccgcgggcttatgacaatcacaactgcatgaagagaggaagctagccacgcatgccagcgtcagaaagctgatcagtctcatgcggctatgagacccgcacgaagtaccctaggcaagcaaattttacttcatcaccattacttttctccaaatccggaacaaaggcatttgcccggacggttttccttttttccagcccgtgggcagccggcaaagcacgcggcgggggcagaaacctgtaggcggcagcaatccgccgcctttcaagggactttattcccttcctgaatcaacttgattttccatcgtctcccggcagcccttcctccgcctccagactgttcatccataaattccatttttcaatgaaagagcggtccatctgaagcaatgctttttcctgctgtgcggcggaaatggttcccgtcagcctgccaaaaataagcaaaggcttggaatacgtatccgccagggaagaaaattccgcaggctgcttctggcggcattcccgcgccagagcatgcagggagttgaacgtaagctcgttccaactgacctggtacgcaccgcttccttcccggctgtcctgaggctccacggtcagcagatgccccttcattcctttcaggcgcaccctggagccatctctgagcaccagagttttccccggtttcttttccagcagtgcgggcaaaagtctctccatgcgggagaacaacggaagcatctggtccgtcatttcccggcgcatggccaagcgggctttcaccgcaggagaggaaatgactttttccgcctctccataaacagtggaaactttctcataatcaccggtttccttcatgatgccctccgcttcccggcagacgtcttcataacttctggattgggcggccagcagaatttccctcctcttttcctcctccagttttttttgcctctcttccgcctttttcctttcagacgccttcacggcttccgcagcctcccagtcccgcgcagcctggtactgcatcctcaaatgatccagtattccttccagcgcggcataagccggagacatggaaggaacttccccgctgaccatctgtccccgcaggaaatccgccgcggaccgtttggcctctacttcagccaccgttttttccggcatgtcctgaagacgtttcaagcgcgcgtactggtccgtatacttctccaagttgctgagccacgcggaagccagctcacggacgttcctgtcccggtcatccgccgcatcagcggccacccggtccagaaagccgccgtattccgtccatctcccggcaaagtaccaggatttcagcgccatgcccacataataatgcacggccaggtcagaattggagcgcagccccggcatccgggaagaccagtccgcggagctcaggtacatgaccaggttgccaatatccctggaacgttccagttcctcagggtccccgcaggcttccatttttctgcccagttcttccagacgctccaccccttccgggaactgaccgcgcacccacatgcacagaacctggttcaaaccggcccaaagggatgtggacagggggcagtccggctgagccgccaaatcgccgaacatggcggcggctttcaccagatccccccggttcagggattcctgggcttcgttaaacagtttgccgaagcggatgctgcgctccagccgcgattccgccgcccccctgtcttccagggctgcttccgccgcaggagaaatgggcgaaggcggagttgcgggagcaggagctccctcctcccgccatttcgtccatccccaaacgcccaacgccagcgccactacggaagcaatggaggaggcaacgatgatgcggcatttcctgcgccgtgcacgccgggcctccaccgcgcgccgttccgcccaggtgagaccggattcctgcatggcccgggcgtattcctcctgcgcctgtgccacggcatccatcaattcgggataggaagaaaacctgtcttccctgtcaaaagccatcagcctgtccacaatgaaacaggtcattggagaaacgtcgttcaccacctgctccaggcgagggagatttttcttgttctccagaagaatatcggaagactgggaagcgtccacacggggaggcgcacctgccagcaaatggtacatggtagcccccaaagcgtacatgtccgtacggaagtcctcctctcctcgcaacagcgtttccggcgcggcgtaataaggagtcacccatatttcccgctccatgtcggattcactatgaagcagggacaggccgaaatccacgattttggcggctccgtcgggagacaaaagaacgttggcgggcttgatatccctgtgcatgaggcccgcattccatgcggcgtccagcccgcgcacgatatccagcgtcaggcgcagcaccctgtcttccggcacacgttcctccgcagcaatcagggcatccaggccattgccctccaccagctccatggcaatgtaaaaaaggccctggtcacgtccgacggcataaagctgcaccaggttttcatgggaaacccgcgccatgatccgggcctcccgttcaaaacgttcgcagcgcagggcatccccggcataagtatcattcagcactttcagggccacttcccgccccagaacggcatcctccgcccggaacaccacgctcatgccgccttttcccagttttccggtaatacgataaggccccatgcgcgtttttacacgcgtcagcgcctggcagcccgggcaaatggcgttggcgtacggaggcagcagggaaacatccatgggctgtccgcacgccgggcaattgacgatgttttcttgctggggaatcatgaacgcagggcggcggaacgggaatcagaaaaaaggaaggaggaataacggcgcggattgtccgtccccccctccgaatatgagcagggagggaccccagccagggcccctcccgcaaatttgattaatcccgtcaggagagagccggaagggaagcggcggctacggcctgtccgtggcgcttggtcttttcatccggcacgcggagctggatcttcagctcggggaattcggtgcgcagcacttcttccgccttgtcaatgatgatctggccgccgtctccggaagccacacggcccaggaagagcaggttgcggatatcatagaacctggcgtaatgggcaatggcatagccgaagtgcacgccgatggtttcataaatcttgcgggcgcgttcgtcgccttccgccatggcggcctgaacctttttaagctgttccgggaagggcattccttcaaactggaaaccggcgcggggggccaggcgggccacagcctgctgggagaagtaaagggcgcctacgcccatatccttggaccattcgtccactccgccttcctccgagtagtccacaggggcgaaagccagttcattcagccagggcttgatgtggccttccggatccacgtagtaagcggcctcggaggtgcccatggccacgccgagcacggcgttatcgttcatgcccatggcccctgcgagggcggtgacttcaccgtcattcaccacttcaaagggaatgttgttccatttttccttctggagggtgcggaataccttgccgagagtcttttcaatgtcttcctggctgacgccgcggaacagggaggaagtgcgtacttcactgttgatgatcacgccggcggaggatccgccgatggcgtccacccgggggagatgagcggcggcgcgttccagagaatcctgaattccgtcaatgtgatactgggggtccttctggaagtaagggtcccagaccacttcctcggaataaaccacttccccattcaccacggcggcgcatttgcggtcggaaccgcccaggtcaaaaccaatgcggcagccgtccaggttgcggcccagtgtcatggagccggagtattcctcgggaagttcttccacggaaacctttttcacttcaatcggggagccgtaaatcttcttgccgatgaaatcccagtcgaattcgcggataccgcctttgcaatagcgggaggccagcatgtccgcaatagcgtcatccccggcgacgaggatgatattgccacccttctgccacagcaggaatttcacaatgcgctccacataggtctcattcagggcaatgttttctccggtatggggaagaagcttgccggaccagcggaaacaggtcccgtcattgcgggtcagagcgatatccacttgatgagaagcgggatcggcggcggctttggcctcaaaagcttgattccaaagaacggcaggcacgaagccggggtccagcacaggcgtgattttgggttgaatattcatggcgataatccgttggaaacgtagcatacccgcttttccttgaaaagtattcattccctttcctgatgattttttttgcggaatgaggggagatagctcattttctgctggaaaatcaccgtgtttccactaaagagacaggagcttttcttccggcgcggtactctggaagggcggcccattccacacatgcctattccatgaatgaattaacggaccagctcattaccctgttctcttccatcctgattaccgtcatgttcctcgccgtggcggtaaacatattccgccggaatcatgcgcctgatacccggcatccgctgaaatggcgtattcccgtaggccatctggacatgctggacatcgccatgtgcggcatcattgtgctttacttcagcctgggggccctgttggcggcagccacgcctccgggggcttccgctccgcccagcacaaccaacatggagctggacagctacaaggttttcaacggaacatgcctgaatctcattctggccttcgtcctgctggtgcgcatgttccatacgggccggatggaggcgctgggattgaaaaaacattccctgaaagtcctcctctacgctccggcggcaggttatctgctggtgctgaccatccacttcctgctggacaaggcgggcctgttccagtggattgaacacgccaccaacgccccggccgaacaatccattgtttccgtgctgaggcactccagcgacattcccctgatcacggttatctgcttcagcgccgccatcgccgcccctctggtggaggaacttattttccgcggttatctgtacccgatcatgaaaaaatacacgggcgtctggtttgccctgatcaccacctccctcctcttcggcatcatccacgtcagcctggttccgttcatccccctggcaatcttcggagccgtactggtgctgctgtacgaatacacgggcagcatctggacgcccatcatcgcccattgcattttcaacaccgccactctcatcaacattctgtatcccggcatccttcttccgtatggaacctgagcccagcatccggcagacgggagaggatgcgctggtagcccgcctcctgcccctgatgccttccaatccgtccctggagacggggccgggagacgattgcgccataatccgggggtcaggaaaccgccagctgctcctgaaaacggactgcgtggtggaaggcatgcatttcctgcccggaacggacccggaactgatcgggaggaaggcgctggcacgggccgtttcagacataggggccatgggcggcacgccccttcacgcactggtgaccctgttcgtgcacgcagaccgccccatctcccaggtggaaggaatttaccgcggcatggggcggctggcacggcagttcggcatcagcatcgccgggggggaaagctccggcctgcccgcggacgggctcatcatcaacgtggcgctgaccggagaagtggaggaaggcaaagccgtactgcgcagcacggcgcgggcgggggatctgattgccgtaacgggaacgctcggcggcagcttccccaccggccaccatctttccttcacgccgcgtgtcagggaaggaggcatcctggccgcctccggcgtagccacctccatgatggatctttccgacgggctgggaaccgacctcccccggctggcggccgcctccgggcttgggttccgtattcatgaagagcttcttcccgtgcgcccggggtttactgtagcccaagctgtaggggatggggaggattacgaattgctggtgaccttccgtcccggcgaccgagaacgggcggcacgactggccgcggagcattttccggaaacgcctctcaccgtcatcggggagatgactgcggaaacggcctccgcccttcccccaggttacaggcacttcagctaacccgttaagaaccgggggctgagcaacgcaaaacgcctgcggaattattccgccgccttttcctcctctttctcccgctgcatgtaaggcaggagctgttcatacgcgtctttgcccagataacgcttgatggaacgctccggcgttttgaaaatgtccaccaggatcaggcagtccaatacatcgccaaaatgcttatccacgctgaaggaaagaattttgccgttcaatttcagatattggcggagcaatacgggaatgcccttgccatcctcttctatatcagcgaccaattgggacagcccctgggcatctgccagccccagagggaggatgcatgattccgacctcttcaggtccgctttacggggcggattgtaggccctcacctcattcaccagcacgggctccatttcatgcgccttcagataggagacgatgagggcgcgggaaaggttggtgtaatcccgggaaatgctgaccgtgccgaacaggtagcggtaatggtggttgcgggccatgaactggccgatgccctcccaaatgaaaccgagagccagcggcctcttctggtattccggaacaatgaaggcgcgccccatttccagagagcggtccagcacccgcaaagcggcaggggaaaaggaaaagtattctccgttgtacagccctttcacaccgtagcgggcaaggattttgtccgtttcccccatgcggtaggcgcccacaattttctggtgcgttctgtcccacaggaacaggtgcttgtaatggttgtcgtatgtatccaggtcgcaggcgttgccggaaccttcccccacctggcggaaagtatattcccgcaaacgccctatttcaataaggatattggggatttgcagggcatccgccacgtacacgtcccaatctccattttcctgacgggcatgcagacactccgggggcagcgcgtcgatttccgcctgcatatcctgcacggaaacgggggaggtcagcgcggccatcttcgccttccggtcctttttgtgcacatgggggcggcggcttttttcataacttttgcccagcagataggtgcgcaggcgcagatgggagacgatggcttcatcggaatcatactgtccaagctggctgaacggaatgggcttgcctaccacaatgcggtgtgtccggcggccgtcccgacccacttcacggggaaggaacgccacgcgcgccttgcggttgatcagggaaatgccctggaacagcaggctgttgcgccccgggaaatatacgggcaccaccgtcgctttcgtcatgcggataatggcggcgatattcgcgttccaggggtcgtccgtcacccttttgtgggccaaggaaaaactggagaccgtgccggcggggaaaatgcccagaaccccgccctgccgcagccaggaaatcatcttgcgcatgccggaaaggtttttgcgccgggcgttctcatcctcatacacgtccaccttgatgagccagggatccagctccccgcacagagaaagctgctcgttgaccaggatgcggacatcctcccttacgcgggtaagcagctccccgaacatgatgccgtccgacaagccgtgcggatgattggcgacgacgacgacaggccctttcttaggaatattttccagatcccccgggcgcagctgaagcctcagattcaaatgcctggaggcaagctgaaagaaattttcctgagaaccggattccttgtcgcgcacgatcttgtcgtacgccttgttcaggcgttccaggcccagcagcttttcggcggacgcggccaccagagcaggcagacgcgtattctcgtccaaaatgtctctgatgtccaccatcttcgggtgtttgagctgggccatgccccgctgtataacggatttacgggaaaaagtgaaactctttttgcaacgcccttcggaacgcagtcttgatttccacagggctcaaagctacaattcaaacggctttagcccccatttccaactcagaagacactcatgcatccagccatcgccattgacggccccgccgcctccggaaaatccaccgtcgccaagctcatcgcggaccgcctcggctatacgttcatcaacaccggggccatgtaccgggccgttacctggtacatgctggaacagggcatcaaccctgcggacacggcggccgtgctggaatccctgccgtccgtgcctctctccttcggcaaagacggcagccgatccgtagttctgtgcggacagcatgtgctgggcgaagaactcacgagcaagcaggtcaacaaccacgtttccaccattgcggccataccggaagtacgcgccctgctggtggaacggcagcgggaatataaccgccgggaacccgtcgtgatggaaggcagggacataggcaccgtggtttttccggatacgccgttcaagtacttcgtcaccgcctccgaggaagtgagggccgcgcgccgcgccgcggagggactgacggactccatcgcggaacgggaccgcaaggattcctcccgcgccaccgccccgctggcgcaggcgcctgacgctcttctggtggatacgtcagacatgacgattgaccaggtcgtccgtttcatcaccgacaacatccaacaaaaactctcctccagatgaactctttctactgggttttctacacgctcttcaaaagcatttccaaagccttcttctcctggaaagtcgtcaaccgggaaaaacttatcgaagacggccccgtgctcatcgtcagcaatcaccagagctttctggatccgcccatgctgggcatttcctatgaggacggcatctattttttcgcacgcaagacgctgttccagggcattttcaaatgggccctgcccctctgccaggctatccccattgaccaggaaaacccggatgccgccagcctcaagcacgtgatacgcctgctgaaatccggcaagcgcgtactcgtgtttccggaaggctcccgtacgccggatggtgaaatccatgacggcatgggcgggatcggcctcatcctgagcaaaacgaaagttcccgtgcagcccctgcgcatcagcggtgcgtatgaagcctttcccatcggtgcccggtttcccagggtccgccccgtcacggtcacggtgggagaccccatccccttcacgccggcggaactcaacgccaaaggaaaagatgcataccagcacctgacggataaaatcatggacgccatccgctccctccctgcggaataacccctttcccggccccatgatctccaggctgaaattaatggacttccgttgttacggaagcttctcctggcagattccgcagcagggggccatcatcctgggaaacaacgcccggggaaaaaccagcctgctggaggccgtttgcttcctgctgcgcctgcaatccccgcgcacggcccggaccgggccgctggtctcccacggaaaacaatccttcggcatccgcggagaacttccgggacaaatccggcgcatcctgtgggcgccggacgctccggacctccgcgtcaacggagagcctcgtaaagaccagcgcagctacctggcggacagctatcccgtggtatggatggggaatgacgacctttccctggtgcaggccggcgcggacgcccgccggaaatacatggactttctgggcagccagtggcatccaggctacagactggccctgttcagctaccgccgggcgctgaaaacgcgcaattacctgctcaagcacaggcaccgggacaaactccagctggacgcctacacgcgacagctggccctgcacggcacggaactgagaaacctgcgcgccaatctgctggcgcttctggcgccccatatcgccctggcctaccgcaatatcggcggaaggcaggaacaggtctccatcgcttaccgtgcctcggaggaaggagacctgtatgaacggctgtgcgcctccatggaccgggatatccggtacgggcaaacccagaacggcccccaccgggatgacctggacatcacgctgaacggcagaaacgccgctcaattcgcctccgaagggcagcagcgcaccaccgccatctccatgaagctggcgcagtcctccctcctgacggaagaaacgggacatacgcccatccacctgattgacgatgtcttcggggagctggaccccacgcgccggatagcctttctgcagtcgcttccagcggacgcgcagagcctcatcaccaccacccatctggactggctgcacaatgctccgtgccccctgccagccttccggctggaggatggcgcccttgcacccctctgaaaaagcgcggacagaaacaacggacaggcgtccgcctgcggcatttccggagcgctattccttcacccatacgttcaggatttccacaatatacatcttatggaaatccccggcggaataccactccggcacaatagatttatccagaaaagcttccgggttgagaggctccgcgtacagcttgcggcactccagcaccaggcgcgcttccgtaaaacttacattgccgttctccgtcacgtatggcgtcaggccggaagcggccaccttgtccgtatcccgtccgctcgttgttccgcacacggtcagagccttatggtactcatggctgaaaaaggaaagcgtcagctcgtccccggcctcaataaaacggaaggtatggcgctgggggcggataactacaaacgccacaggcttcttccacatgaaccccaaaccgccccaactggccgtcatcatgttgaaatgctccggagaacccgccgtcaccagcatccaatcgtccccgatcaattgtacggcattatcctgaatctcctttggttcaatctttttcatcatcgtctccaacgttcgttcgcaaactatcctacacccctcctcccatatgtcaaagctgtggagaggccgggatgacgcgggaaaacaaattccgtccccgccgggaagctccctccgtttggagttgcatttccggaacggcggccctagcatttccgggatgaaccacaccgcgctggaagacaagctgggttaccgtttcaacaatccggatctgctcgttcaggcccttacccaccccagcacggacagcaagccggaaacgcgccgggcgtatgaacggctggaattcctgggagacgccatcctgcagctggccgtcacacagtacctttaccaccacatgccccaatccccggaaggggaactgacccagctgcgcgcccggaccgtcagccgcgccaatctgggcaaatacggctttatcctggggctggataaacacattgccctgggaaaaggggaagaacgggccggcggacggggcaaaaattccatcatcgccaacacatttgaatccgtcttcggagccatgtccctggattccgactatgaaacggccaaggctgtagccctgcgcgtcctccatgaagctctggattccgcggccagccatcccaaggaaatcaaccccaagggggaactccaggctatccttcaggacatcctgcccgaaactccttcctatgaaacggaagaaaaagggccgagagacgccgaaaaccgttttgaatcccgcgttttctggcatggtcacgccattggagctagctccggggccagcaagagaaaggcggaagtggccgccgccgcagacgccctggacgccagggcatggctccgcatgaccttgtaaccgccaaagggggacgggtggctattttgtcacccttaagccttggacactcctgtggctggtttgatagacagaagccgtctccgtgaggaagaaccttccccggaagaccttctcacagacaaaccaaccatagaaaacaaatgaagacctatactctccccgtcatcggcctcatgactctcggagcctccgcctttgccgctgccgcgccctctaccggaaactccctgctaagccgcgacaacttttccgcctgcaaatggctcggcgaccgtttcaagtggttcaactcggaacgggaccataagaatccttacatccaggaattcaacgtttccctccgcatgcagtacggcctggactggattgacccgaacggcgaaggccgcgtcatgggtgaaaaggaaggcaacggccgccgcttcaatgatgaatggcgccgcttccgtgccgggttcaacatgaagtttctgaacaatttcaagctcaacaacgtctggaacatcggcggcatggacggcctggaaagctacaatgcgaaaaccaacacatgggacacctccgacctgacctactccctttacgaactgaatctggaatacaagggaggccccgtcacctatgccatcggcaaaataaagccgcgcatcaccggggaataccgaacgtcctcctccgccattctgactatcgaacgctccatgctggtcaaccagctccgctcggaaaccaattacggattccaggtgaacaattccgacaaaaaggacaagctcggctgggccgcaggcgtctggctgaacggtaacggaggcaccggaaccggcacgttcaacaaccgcattgaacccgctttcaactcccgggacaactgcttcatcaccggcacgctgagctatgacacgtccaacgacgttttcctgaagaaaagccgtctgtggctggattacgcccacaatttcaccaagtggggggacgacgcccaaaacaaggcgtatgaaaaactgaccggttacggctttaaatccaaataccagggtaccggagccagggacgtggtagccctgacctgggaaggttccgagggggatttctccctgatgaccgaagtcatggtaagcttcaacgtcatcggcatgaaagcgggggctgaaaacgtcttcggcgtaaccgtcatgccgtcttacaagttcaccccccactgggaaggagtggtccgctaccagatggcggcgggcagcaacgccgtaaaatgggaaaaacgctatacgcagaactccacttattccggaacttccgactgcatgcaggccctgtacttgggcgtcaactactacattttcgaatgcagcccgaacatggccaagatcatggcgggcatcgaatacgcccattccaacggcacggacgccagccttaagaaaggctttaccggatggagctacaacatcgccttccgcaccaacttctaagtctaagaaagtgaggcgcgaaaccacgcattaggtttcacgggcaggataaacgatatggagtaaaatccggttcatcctgcccttttttcttaaaatcacaatcggatatccgggaatgtttccgatttcaaagaaatcagtttgggcagggccgtgtattcacggccttttttcatcaggccgtaagcgctcaccagattctggagtttttcgtaaatcctcagcctcaggatttcctctccgcccagggacatgtgctttgccttcatcacgacaacggtacgctgaaaaatgtcattgaattccagcacgcccgcttcatgaagaatgagaataagctcatcagtcaccaaatccggtgtcttgcgcgaggaacgtgatctcctatcctccagcatgatgataggatattatcatgacacacttacagccgtcaagttgataaaatttgcgtcattttccaccggcatacggctcaaaaagcaccaaaggcgaaggggccgacagcgaatgaggcctgttccagaaaccggaaatgagttgccgccccttctctccggaggacttacttatccggaaggagaaaagattctctgcaagaaaagggaacggggaacacgtattacctgcagcccgggcagcaatacggagctttttacagagatgaaaggaaataaacggttcattttcaggttatgtgcagccgcagcgctttttctgaacctctttcccctgcaggctggagaatgcacactgatgagctataacgtaaagaacggcaccggcatggacggcaggagggattatgaccgcacggcccgggtaatcgcggaggaaaaaccggatgtcgcggcccttcaggagctggaccaggggacaatcaggagcggcggcagggataccctgcaggaattggccgcaaggacaacgttgacgggtacttatgccaaggccattgattattcaggcggttcctatggagtaggcattttatccagggaaaagcctttgagcgtcaaacggattcctttgcccggcagggaggaggcccgtgtactgttgatggccgagttcagggattactggttttgcgccacgcatttgtccctgaccagggaagacagcagcgcttccattgatatgattgccgcgctggccgcaaaatgcagcaagcccttttttattgcaggggatttcaatttaacgccggattcggagccgataacccggatgaaaaaatatttcatcctgctgagcgatccggcccaaaaaacgtttcccgccgggcatccgaaggaatgcattgattacatctggatgtacaggggaaaaaagacggaggcgttccatgtgaaggaacgcagggtaattgaagctcccgccgcctccgaccaccgcccggtcaaggtgacggtcagctattgacatgatgcttccggcccgtcaccgggtagcccgcggggcattgacgccgcccaccagcagcacgatttcccccctgggggggcgttccgcaaattccgccgccagccgggaggccgaaccgcgatggtaagtttcaaaggtttttgtcagttccctggctacgcagacgggaatatccggatccaacgccgccagagcctgcacggttttgacgatgcgatggggggattcataaaaaatactggtatgggaagcttccactgccgtttggagcacagcgttttttttcccggatttgacgggcagaaagccgccgaagaagaatgcgtccgtaggcagtccggaccccaccaatgccgtcaccacggcggatggcccgggaaggacggtgaagcttactcccttttccttgagggtctgaatgagacgatagcccggatcgctcacgccaggcatgcccgcatcactgatcacggcaaagctttctccgccggccgcgcgcgccgcaatttccccggcacgcggctgctcattgtggtcatgcatgcttaccagcggtttgcggatttcataatgggaaagcagaagaccggaatggcgggtgtcctcacacgcaatgacatccaccttgcgcagcacgtccagagcccgcagggtgatgtccgcccggttgccgatcggcaccggaacaaaataaacgctgtattccactttctccataagcacagattttcctgaaccgggcgggattagccattggtaagggtttccgcaatggaagtagccaccagacgggccgcataggaaagggcattcgtacgggccgactgaatgttgccctggtcaaagaattgacctacttcctccgcagagcaagcatacaggatttcctgcgtcctggcgtccaccacacggtatttgacagacaggcgcaacccaagttccgtactcttgtaggtgtcttcccggctggatcgcaactggtcgaaggtgatggagtacacttccccctccacccggatatccgcatccgcaccggagcttaaccggtaggtgccgtcccgctgcagctcatccgccaaggcgccggtcaccagcgtggcggcacggggttccaaagagttgttggtaaagaggcataccttgacggtctgggccagttccagcttgggcggcttggtgccgccaagctggtagccgcaagaaccggccaggaggcaaaaaacgggcaggaagagtttgaaaacgttccggatacggttcatgaggacggagagttcctgttatctgctggtcacgcgcagttctttcaggcgggccttcgccctggcggcggcggcgggattgatgctgcctttggaggctacttcctggtagcagaagacggcggcatccgcatctttcatcttggtcaggtagtattccgccacttccagctgctgggccaccagctcacgcttcatggccgccagatcggcacgggcggctcccgcacgggcgctgttgggataacgctgaaggtagtcttcatacgcttcctgagcgcgggccacattgacgtggttgcggtctccgtccgcagcagcctggcgatacagggtggctatctggagctgggccgtgggggccagcggagagttggggtaattgtccaccaggttctggtatgcctcgatggcctccttcatccggccgcgggcggccagataattgcccagcacgttcatggcctgcggggcggtaggggcatacggggcgttgtcgcgcacatgcttcagccattccgtgacgttcgtgggatccatcctgacgtcaaacatccacagcacgcggttggtcagcgcgccgctcgcagcgccgaaggccatttccttctgccgggacatggcctgcctgtacagggggctgtccgggtggcggtcaatgagtttctggtactggtcaaacgcttccgcaggttccttgcgggcctcatagagttccgccattctgaaccgggcctggggagcttccctggaaagggggtgtttttccaccacgcgcctgtatttcttgatggccccggagagatcattcctcgcttcctttgccctggcttcctgcatcagggcaatcgcctgctgatccaccatgcggacggttccgggaggaggaggcgcttccgaagagcattggcacagggccagcgccccggaaacggcagccatcatgagaaacagttttttcacattcatgattttacagcagaaaaagagggcgcgtcaacccggcgaacgcagattgacgcgcaaaaggagttaatggcccttgccgtacacggcttcggcatcaaaaacgacgcctccgtccgcttcacgcagcgtgacggcccccccctggggctgggctttcagttcatcgccgaacggaacggaacggtaaaagcaggagtggtgcccggtgtggcaggctccggcgccgcactggtccaccagcacaatcagggcatcctggtcacagtcaaccaggatttgctttactttttgcacatggccgctggtagcgcccttatgccagatttcctgacggctgcgggaatagtagacggcttcccccagttccatggtcatgcgcagggattccgcattcatataggccagcatcagcggttcatgggtaatatggtccatggcgagggccggaatcaggccgttctggtcaaatttgggggcaaattccacgcctttttccacattcaccttgccgcggtcggcaaagacaatccgggatgagatgtcattttgttccataaccggcccccttagtacatgaaatatccgacatataccaatcttttctgttgccctgacgcaacgaaatgttttcataggagcatatggcatttacggcatcccaagcgttcgacctgctgcgcactgccttctcccgcaaccggcttccccatgccctgctcatcgtgggagacgagcatcagggagcctcccgcctgatcctgcaactgctggagctgataaacggcatccgggcagaccatctggacagtgtaagggacgagtattgcaagctggtgcgccccaagtccaagtcgcgccgcatcctgcgggatgatatccgcgccgtggaaccctttttgcaacagcgcgcggcggaggggaaatggaagatagccgtgttcatggatgcggagcggatgaatgacgaggccgccaacgctttcctgaaaaccctggaggaaccgcccggccagtgtctgctcattttgtccacctcccagccggatcagcttctccagacaattatttcccgctgcgtgcgcgtcaatctgctgcaatccggagaattcaggctcactcctattcaggaggccctgctcccgcactggctggagacctgccgcaatctgaataatgacctggccgctctggccttccgcagcaggttcatggacgtcatggcagaggccaaggccgccatcaccaaaaacctgaatcaggctctgaaagatgaagccagggaagcagcccagggtacggatgcctccgactgggaggcccgcaataaggacgcgaatgccgcccagatagagacggaatatctggaacagcgcaatcaggccctggaactgctcatcagctggttcggccaggcagccctgattgcctccggagccccggaagtcgctccgattcatccggaggtgcgcacactggccgcccagatgcccgtgaacgaattgctgaagcgcatggaggccctcaacaggctccgtgatgatttgaatttcaatattcacgaagccctggccctggatgtccacctgctggcggccgtcgggtcctgctgacgaacaaccccgcctgttaccgtcgggccgcgcacggcattggaaaaggcgcagaaggtctctatttttccctttccttccggagcaggggcgccatgatttcctcataggcgcggaatttctgctcatacgtcagccgcgccgccgccggactggtggaaggcatttgaatgacggaaagcgtttcccgaaggaacagttcgggaaaataccgtttaaggtatttatgggaagcggtgccgttgcagcagaccacgccgatgcccgggaagcgatccagcagggccgcaatatcattgggccgttcctgggagatgtgctggtccaggctgccgggcctgacgccggaggccaccacgtcccacagccccaccccgccccggttgagcagggacaggcgttccccatatggcagggagggatcgaaccccagaagggaccccatgattttccagaacgcgttgcggggatgggcataatactgggcctgacgcagggattcgtctcccggcagggaaccgagcaccagcacggaacagtccggggtgacggaaggagggaaggagcattttttcacggcgggaaacggtcagggggtctgcatgccggaatgcctgcgcacttccttcatgcccacttcctgccggagcagggaggacagccacgggtggcttcccacggagggggccaggttgaaccgttccggcctggtgatgcgcgtgaaaatgacgcgcttgatccgggatttgggcaccgtcctggctccgtaaccatccggaatgttggaggaccagaacgttacctggtcccctccatccttcaccaggacggtcagatggccggattcccggcgcccgatgcggtccgtccagaaaattttcatgaagtcgccggggcgggccttcctccagtcctcaaagttgatgccggctcccagcctgtgcaccaggacggccagtccggggccattggcgttcgcccatccccacggcccttccccgtcatgctggccgaagcgggggatgagggccagccacgcgcgttcggaaataacgggccgcggctgtgcagagtcccatatctgcagggatttcaaaaggagcaggtagcaggcggaggaacagaaggagggcgtggcgttacggagaagaaaaacgggacggcgcgtgcgggggtcccagcggcaggctttctccgcaagggcctgcatggcttccctgctggtttcgtagccgccgccgttccggaactgggaaagtccggtccgcagggcctggtaccaggaagccgcccccgaaggcacggcgctcccccgccccgtggaagaaaggtccgcagccgatgctgcggagcacagcaatccaagacagcaaattaatgtcagggcgttcctcatccttgctccgcagggtatacggactgtggaaaatatcaagggcggattgcgtgcggcactgtacgaaaaggaaagaaggccatagccttttccccggaattcctgttgttttgtctggacttatcgcccggcgtcccgtactgtgcgtcaggtcacgcgccgggtatgcggagcggagaggcaacgcaccttgggcggaccttgtttccggcatttatttttaaccaccacggaccacatagaggcatcataccatggcaaaacgcgaagatatccgcaaaatcctcattatcggctcaggccccatcatcatcggccaggcctgcgagttcgactactccggcacccaggcctgcaaggccctccgcgccgaaggttacgacgtcgttctggtgaattccaaccccgccaccatcatgacggaccccggcatggcggaccacacctacattgagcctctgaccgtggaccgcatcacggccgtgattgagaaggaacgcccggatgccctgctgcccaacctaggcggccagacggccctgaacctggcttccaagctgcatgaggaaggcatcctgaaacagtacggagtggaagtcatcggcgtggatctggaagccatcgcccgcggcgaagaccgcatcattttcaaggaaaccatggacaggatcggcgtgccggtcgccaagtccgaacccgtctactccgtggaggaagctgaaaaggtggccgctgaactgggctaccccgtcgtgctgcgccccgcctacaccatgggcggcacgggcggcggcatcgtttacaacgtggaggaactgcgccaggtagtcccccgcggcctggccgcctccctcatcaaccaggtgctggtggaagaatgcgtgctgggatgggaggaactggaactggaagtcgtccgcgacgccaagggacaaaagattactgtttgctttattgagaacgtggatcccatgggcgtgcacaccggagacagcttctgcgtggctcccatgctgaccgttccgcaggaagtgcaggataaacttcaggattattcctaccgcattctggacgccatcggcgttacgggaggcacaaacgtgcagttcgcccacaaccgggaggacaaccgcatcatcgttattgaaatcaacccccgtacatcccgttcctccgccctggcttccaaggccaccggcttccctatcgcctccgtctccaccaagctggcctccggcgtcacgatggacgaacttccctactggcgcaaaggctccctggaaaaatacgaaccttacggcgactatgtggtcgtgaagttcgcacgctgggcctttgaaaaattccccaaggcagccgacaagctgggcacccagatgaaagccgtgggagaagtaatgagcatcgggcagaatttcaaggaagctttccagaaggccgtgcgctctctggaaatcggacgtgccggcctgggccgtgtgaaaaagctggaagccctctccaccccggaattgcgtgaaaaaatcacgtacggcaacagcgaacgcttcttccagatttacgaactcctgcgccgcggcgtagccgtggaggaaatcgtgaagctgacccgcatcactccgtatttcattgaacagatgaaggaactggcggactttgacttttccctggatgggcaggactgggattccctttccgcggaaaccctgcgccaggccaaggaaatgggcttttccgacaaatacctggcccagattttcggggtgccggaaaaggccgtccgcgcccgcgcgcagaaaaacggcatcacggccaccttccgaatcgtgcccgtcagcggcgtggaacacgcggaatactactactccacttacagcggcgcggcggacgaagttcccgtgaacgacaagaagaaaatcatgattctgggcggcggtcccaaccgcatcggccagggcatcgaattcgactatacctgcgtgcatgccgccttcaccctgcgcgaccacgggtatgaatccatcatggtgaactgcaacccggaaacggtttctacggactttgacacggccaacaagctgtactttgaacccgtgaccgtggaagacgtgctggctatttacgagaaagaaaagccggaaggcgtcatcgtccagttcggaggccagaccccgcttaacatcgcccaggccctcaaagacgccggcgtaaaaatcatgggaacccaaccggaaggcatccgtctggcggaagaccgcgaatatttccgtgaacgcatgatcgccctgaatatccgccagccggaaagcggcacggcccgttccctggaggaggccgtggaactggggcgccgcatcggctacccggtcatggtgcgcccctcctttgtgctgggcggccgcggcatggaagtcatttacgatgaagaaaacctgaagcgctacggcgtggaggccatccaggtcagcccggaatatcccatgctgatcgatcgttttctggacaatgccattgaggcggaagtggatgctctggccgacggcacggatacttttgtagccacggtcatggaacacattgagctggcaggcatccattccggcgactccgcctgcgccatcccccccgtgacaatcgctcccaagcacatccgcaccattgaggaacatgccgccaaaattgcccaggacttccaggtaaagggcattctgaacgtgcagttcgccatctgcaacgatgaggtttacatcattgaggccaatccccgcgcctcccgcacggtgccgatcgtctccaaggtaacgggcatctccctggcgcgctacgccacggaaatcatgctgggcaagaaactcaaggagctgggcctgaagtcgcgcgcctgccgtttcatcggcgtgaaggaagctgtcttccccttcaacatgttcccggaagtggaccccgtactggggccggaaatgcgcgccacgggtgaagtcatgggcattgcggacaacttcggcatggcctactacaaggcccaggaagctgcgggctgcattctgcctaccgccggcaaggtgctcgtcacggtttccgaccgggataagaagttcatcgaacccatcgcccgggacctgatttccctgggctttacgattgtctccaccggcggcaccgcagaatacctgcgcggccagggcgtggaaacggaagtagtcaacaagctgcatgaaggccgcccgaacctgggcgacatgatcaccaacaagcagatcgacctgattatcaacactccggtggaccgcaccagtatgattgacgactccttcatccgcatgcagtccatccagaagaaaattccgtacatgactaccatcgcagccgccagggccacggtggagggcatccgctccgcccagcacgtgaaggtatcaccccgttccctccaggaataccattcctgaacgggaaatactccggctatttcaataaaaccccgcatgcctgaaacgcatgcggggttttattcatcgtccggcagacggaggatgtgaatctcaaaaatcgcccgtccgcagattacctccttgccgcactaatgcagatcaagcccttgctatctctgcgcaaatcaatgtggcattatcctggttgggcgcgccgtcgcggttaatgccgtccagcacggaacgcaccagttcctccgcggaaagcatggacaaataccgcatccctgccggccccagggaatccagataaggccccactccgtcactggcgaccaaaacacggtcccccggaaataagggaaagcattcctcccgcaaatccaccaaaggaacttccttccccatcagggcagaagtcaaggaatggcgggcaggatggctcaaagcctcctcccggctgatgatcccttcatccgccatgcgctccaattccgcggaatactggtgcagctcattaagcagaaacattttctcttcccggataagcagcagaagggagtcccccacgctgacccacctcagcccatccgcccctatccaggctgctaccagcgtcgtccccatctcgtcatcctcccctcttttcttccgggcggaccatacctgttcatttgcggcggtcactgcagctttcattctctctccgggcaaaccggatttccgctcaaaagcccgcgaacagccttccaccgccgcgcggctggccaactctccgccggtatacccacccatgccgtccgccagcaccagtaccaatgcgtcctctccagccagaatggagaaagaatcctgttggttactgcgggcgcccagaatctggtccccatgcaatccggaaaccagaaaaggctcttgggaaaaagtctgatgcatcatggcagtaaataatcgtaacatggatggcctgccttaataaagcaagaatagcgagagaaaatagccatgcctgaagccgcggaatgattatttccagaggaatggaaacgtcagcctgcatggctggaaaaacgcgaagggaacgccccggcagaaagaacccatgcaaaaccggaatgataagcggaaaaacagccattgaatgccccaacctgcaagcgctcccagcgctctccggagtgttgcgccagagaacactttccgcccaggaagaagaaaggaaagtttttactggtggcaggaaaaataattctctactatatttcctgattttttactccatgagccttcattccgccccctccatcgtttgggaactttccggagagccctgtgaaacgcgggatcaagccctgtccggcattaaaaataacacggaagctttcattatctgcagccgtggtgacgaattcctccaggccacctgcaatagtccggaaaattaccattgcgaaatttcgtttgcaagcggaaagggcagggagctttacatgacgcccaaagacctggactactcccggctccatgaccttttttcacgctatgcggcaggggaggatctttcccatctcaaaaaggagtggactcttgatgcccacaaacccggctatattaccgccatcgttgtcgttctggcaatcattgccgtccttgccgtcatcatcttcagttcctgaaccgaaaagaggcctttccttttccggaggccatgcatgaacgccgcatcctcagcacttccccagatacaccacagtttcattcggaaccgtaacgcgtccttccgtttcaaaccggtcaaacagcttttccagggcgtccagccaggaggaccgctcttctccgccctccgtcaaggcataggaggcggacatcatgcggcggagatactgctcccgcgtgtaggacaaatcatttggaaagcggaatatctggaaacggtggttgaaaaacgctccaatgctgtccgtcaacttcgccagccctccgctgaatccataaaaacacggacagtaaagacggtggatatttccttcctcccgggcaatgggactgtcttccaccctggagttccaaatcagggcaaccttgcctcctccggacagaatacggcggcattccctcttgaacgcggcggcgtcaaaccagtggaatgactgcgccgccgtcaccagatccatcgaagctccgggaagcccggtccgctccgccgttcccgccacggaatgaaaacggggaaaagcggacagccgcttctccgcttccttccgcatgtcatcattgggctccacgccatacacggtccagccgcgctccagcatggcgcgggaaagaatgcccgttccggaacctatatccgccagacggggattctcccggcggctctcccgcgtcagaagcccaacaacggaggcgggataatcgggtctgccctgggcataagcccgggcttttccagtaaatcggtcagtattattcattagttttcagggtatggtttactccttttctcccgctgttccagcctcaatgccgtacccggctcaagaaaagccgccatgctgcgggagcccgcgaaaaaacggatttgcccggtgaccgtcatgcagaaaggcatgcgggaaaaattgcgttccttgcccattccccggcaacatgggcggagcagtccctacagatggctttacaagtccttcatgaacttttagtatccggctcaggcccgcctttcccggattgcgtcctgactacgggaaaaacgaacatctgcgggttccatttttcagactgcgccgcccatgttcggatattacagacttgcctccgccgtcccccagctccgcgtggctgaagtggactacaatgtcgaccaactcacggagggattccggaaagccgcagaacagcaggcggcggccgtcgttttcccggaactgtgcattacgggctattcctgcggagaccttttcttccagccgaacctgaggaaagcagccctgaacggcctgctccgctttacggaagccacggaaggctccggcacgattgccgtggtgggcctgcccttccttcatgaagacgctctgtataatacggcggcggtagtgcagtccggccgcattctggctctggtacccaaaaccgtgctccccaactaccgggaattctacgaaaagcgtcaattcacatccggcagggaattgggtacaggggtgaagaacgtcacagtcaatggggtgcatatcccgttcggggcggaaatcgtttttcatgaagaatcttcccccttcagttttggcgtggaaatatgcgaagacctgtggagcgtcattccccccagttccaaactggctcttctgggtgccagagccattctcaacccttccgcaggaacggaactcaccggtaaggccgcatacaggagggaactggtcagacagcagagcggcagatgcctctgcgcctatgtcctttcctccgcaggtgtgcatgaatccaccacagacaccgtattcggcggccattccctcattgcggacaacggcaggccagcagcggagggggaacggttctgcagggaaagcaccctcatctttgcggacgtggattttgaacggctggaggcggcgcgcctctctgaaagctccttcaatgacagcaaatctttttccctgccgggaatgccctgcatctggccctgccggaacaggttcccggagcgcccggcctagaatacgcattcaacccggcacggccctttctgccttctccgtcccgccgccgggaacggtgtgaggaaatcatctccatccaaacggcaggtctggccaaaagaatggaacatacccgcgcgcaacggctcgtcatcggcatctccggcgggctggactccacgctggctctgctcatctgctcccgcgcctgccgtgcgctgaagcgccctgcctcggacattctggccgtgacaatgcccggtttcggcaccacggacagaacccatgacaatgccgtaaccatgtgccgccttctgggcgtggaacttcgtgaaatccccatctcggaatgctgcctccggcacttcgccgacatcgggcacgatcctgccgaacgaaccaccacttatgaaaacgtccaggcccgcgaacgcacgcaaattctgatggatttggccaataaaaccggggggctggtcgtgggaacaggggacttgtcggaaattgccctgggatggagcacctacaatggggaccacatgtccatgtacgcggtcaactgctccattccgaaaacgctgatacgctgcctcattgaacacatcgcggaagaatcatccccggaactggcagccaccctcacggacatcaacaacactcccgtcagcccggaactcctgccgccgtcggacgacggcaccattgaacagaaaacggaagatgtgcttgggccttacgacctgcacgactttttcctcttccacttcattaaatacggtgcggaaccggataaaatcctgcacctggcggaacatgccttccgcggcgaatttcagccggacttcatccgccgctgcctcggcatcttcatccgccgtttcttccgtcagcaattcaagcgcagctgcatgccggacggccccaaggtgggcaccatttccctttccccgcgcggggactggcgcatgccttccgacgcctgcgggaccgtgtgggaaaaagccatcccccactactgagacctcctatccggaaagttgcggagacggcttttcccggaacccggcaaggatgccgaagaccgcatcaatgcccaggggccaacttcagcccgataatgcctatcagcaggaaggatgccgccagcatgcgccagatattggaagaatccccgaaccacagaataccaaccaggaacgtgcccaacgcgccaatgccggtccacaccgcataagcggtgccgatggggatgttccgctgggcaagccacaaaagaaaaccgctcagaaccatgctgaaaacggagcaggcgatgcaggcggcgaatttgccgggccctgtgccgggcgtttgagaaagtttgaaacccagaggccatccgatctcgcagagaccggccaacaccagataaatccaggacatatattgaaacggggaatcaccttccgctcaccggccttcccaaatgggaaaagctccaagggcaacggatgccctgcagaatatctgcccggcgtttccgatcaaggcaataattttttatgaacccgtataaaatgggatacacactgtttcaccggcttcggaaaaatggttctttcaaacatgaaatctacacaaaacatatttaccataagtcacatacctgttctttttaattaaaaaacggtcttatttcaagccttctcgaatatccttgagccggaagcctccgccctgtgatattggttccgttatggctattcattattcacttaccgccatcattctgaccggaagcatggcttccacgggaatcgcagctactacatggacaagcgccacccccgatctctcccccacatcccagtacctgtgcaccggatggtctttctgcctgggagaagcagggtcaaggtttatcacgaccagcacgccgcattcccagccaatggatgcagaagtacgtctaacgtccattgatttcaatttgagagaggccagaaagaacggaacaggcctgctcatcgtgcaacattcaggcggtatccaaaccattatcggcaaatcggacaataccatttctactggaaactatgtttctggaacatggacttttaccaacgggccaattttaaacacaggcactacttattacgccatgtttactgaaacggatctgtccgccatcagcataggagactgctgggacaacgatttcttctccatcaacggttcccggcgtatcgacaattccatggataacgcagccggaacggggccgtctgtcaaccagctcgctttagtcggctccaattggcaaaaggactttattgcccgtaacgataacatggttcccacaggtcttcaaatccatacacaggccgtaccggaaccggcaagcgcattgctgcttacgtttggcatggcgcttctgcccttcagacgccgcaaatctcccacactttaattacaacatccatttcccatgaatctgcacctatcatccctggcagcgttgctcctggcatcataccttccggcgcaggccaccgtaccggcccattccccttccacagcgttcatccggagcggcctcccaatcgttgatctggatcaatggacagaagcccaggtagtagtcgacaaggaaaaaggaaaatacctgggacatccaacgacgctattgctgaaagacggaaaaaccattctgtgcgtttatcctaaagggcacggctccggggaaatcatcctgaagaaatccacggacggaggcaaaacatggagcgaaaggctgccagctccagaatcatggaaaaccagcagggaagtacccacactatatgaaacggaagactcccggggcaagcgccgcattctgcttttcagcggcattcaggggggaaacagaaacatagcccccagaaaccggatggcggtcagtgaagacaacggaacaacatggtccgagctgacccccattcccaaccaggccggaggcattgttgtcatgagtgacctgattcctctaaaaacgggaaaagggcattatatggcctcctaccatgccaatgcccggggcaaagacggacatggagagtttcacaccattgaacaatatgtcacctttacggaagacggtgggctgacctggacctccccccaggtcattttcccagggacaagggacatgcacctgtgtgagggaggttttgtccgcagcccggacggaaaaacaatcgcgctgctgttacgggaaaacagcaggcaccataactcccagatcatgttttccgaagatgaaggtaaaacatggactccccccaaagaactgcaagcagccctgtgcggagaccgccaccagattcttcccctgcttgacggaaggcttctggttcaattcagggatgctcccccgaccaggaagaaagggcaggccgccagcccgacggaaggagactgggtagcatggataggccggtgggaagacctgaaaaacggcacggaaggctcatataaaatccgttttaaggacaaccgcaacggttgggactgcgcctacccggccgccgaactattgccggaccataccctggtatgcactacctacggacactttgacaaaggggaattgccatacatcctctccgtcagattcaaaatcagcgatacggacaagatggtcaaacaatatgcggggaacaatcaccccaagatcaaaaatgacacaggagcgggagaaaccgtttttgaccccaatgagccggactccgttaatcgccttctgaaacgtccctgaacatcatattcctccatgctcccgaaaaacgcggaacggaaaaaacacaaccggcaagaccgcttgccatcagaagtaaccagaaagtatgattcccccatggatacacagcctggggaaacggcccagtcaagaaccgttgccaaattaaagcaccgcctccggtccgggcaattcataaacgccatgcccggagaacgagaactaagcaaagcgctcgccgccggcaggggaaccatccggaaagccctcgcgcagctgcaggaagagggcttcatagcggctccggataaaaacagggccaggaaaatcatcaggacttctacaagccctgtgcagcctctgcccctgctggaaaaacgcgtttgcttcctctcctccgttcctatccgggacatcccccaaagcatttgggtggaactttaccaactggaaaaagcgttgcgaatcgaaggtatggcgcttcagctggttgaagccacatgggcagaaaaaaacaatccggacatgcggctggaaaaactggaaacagaacatcccggctcctgctggatactctaccgtaccacggaagaagtacaactgtggtttaagcggaaaagcatcccctgcctggtccggggagtttcctacccttcctccaatctgccgtatctggatacgcattgggaagtgctggccggtcacgcggccggctacctgtaccagaaaggacaccgtcggatcgcgctctgcataccggattccaagctgagaggcaacaggctcatggaacaggggttcctctccttccagggggaacattataccccctatgtcatccgcatgccgtcggatgccattaaggcagcccaggaactcaaccgaattgacctggcggatacgggtatcaccgccttaatttctacccggagcagaatgctgatatccatcatctcctgggcggccaccatggctaaaagcatcccggaggaaataagcctgctcagcctggttcatgaaccttacctgaaccatgtcactccccccattacctcctaccgctcccctgcagaaaaaacgacgcgcaggcttatccggatgattgaagccctgctggaacatcgccgtatctccaatagcctcattctcccggagttatgccccggccaatccatcagtacgttgaattcccccccctcctgcctttgaatccatcaagtaataaggcctgatctgccttcttccataacgctccgctacggaggaaagcattcaatctccccctcccggagacacctccggaagggaaaaacgtattagccagctttcctctacttgagaacaggagcttttttgccgggagccagccctgtgtcctctccgtccgtcaaccattccatggtaatgggaacaaacttcagctttttaatatgctcctggttttcctcataaagcaccccaacgatgccgggttccaccatggcaaggctggaataggcaaaaccgccctcgcccagcaatttcttcaccggccaggtcttgccgttgtcatagctcatggccacctgtcccttaatgcgccagcccgcgctgggcccggaaaacagaatgcggcttttgcctccgtaggcaggctggtcgctcagggaatacgtcatcagggaattctgggtactgtcgcaaaacagctccggagcgtcctccacctgtccccaggtctccccgccatcctgggaccacgcaatacggcggcaattgcctgcgccccaatggcgcgcaaccatcaccacgccgccgttatccgtttccgcaatggacgtctcgttcaccatgcccttcatattggcagtcggctggcccagcttccagctcttgccgccgtcatcgctgtaaatacaggaaatcacccatttgccgaacggcccttcattcatcggaatcaccaggcggcccttgtgggcgccgctcttcagctgggttcccgcattcgggccggacgccataatatccactcctgaaggacgcttggtcgtcttcgtgatttcctgcggcttcgtccaggaagaacctccgttcctgctctgaatcataaaattgcggatgcacttttcatcatcccatccgtccgggatattgggctgccgctccttgaccccggcagggtaacgctggaatacgacagtcacggtcctggttttggcgtcataaacggggcacggattattaaacgtggcgccatgggccttggcaatcgcccggggacgggaccaggtcttcccgccattcttgctgacgctcatgataatatcgttctccccctggtcggtatttttgtaccgtccttcagcgaatgccaggagctggcccttgccgatactgagcagggcgggaatacggatggacgcatagggattaccctccccggcgctgaatacggtcacagccctgtccgtagggaaaccggttttctcttcctgcccgaacgccggcaatgccacggcgcatacggcactcatcaaacacttgaatacggaattcatcatcctctccaccttattccattttcccctgccgcacaacaaccatgtcatgcatgtgcgccaagaccagagaaaaaggaacactaaagaggaacgcgataccgccgcagggaagccaggaaggcttcggcccaaaactcaaaccagcaagaaacgtgcccagccgaatacggatccccgggaaagcgcccgccggaaccggggaaaatatccggaaacgcgaaatcggctgaaaaaatccctgccgcaccgccaaagccattccacacatcaaccgcccggcctctctctggacaaaccgcttgcctatttattgggacctacatacttgactaaccatccaatataccttcttcccaataaataaaaaaggcgaaggtaaccgtaaattaccttcgccttgacaatccaaattaccctattgggtatacttggataggcgttgtgtcaggcgttaatctgataaaatatacatttgcttttcgcaaatagtataccgccctccaacctaagggcgtcattatgtatactctcgtattcataaaattattatgggaatggtaggtggagctctaccattccttttttctatcatcattttcattttttaatatttttaaacaaattcattcggtgagtataccatatattttgtttttgtcaccaatttttttaagtttaaccatcattaaacccaatgatggttaatttaatcctcattagtttttatatcattcaattttaaggacaattttctactcgccctatatgggtaagaaaattgtataccaactcaaccaacaaaataattctcaatacgctgaaaataaacgcgtacgaactaatcaaaacacgacaaaatttccatatcaaccaagcgatgatatgggacaaactaagctcaaacacacttctctctatgagttcttctccaaatttcctaatgaggaatctgctcggaagtattttgaacttaagaggtggaatggtaatgttcggtgtcctcactgtggtagacataacatcaccgaatgtaaggatcaaaaaccgatgccctatcgctgtagggattgcaggaaattctttagcgtaaggtttggtactattttggaggagtcaaaattaccattacacaaatggttgatgtgcatgtacctattggcaacatctcgtaaaggcatttcctctattcaggtttcaaaagaacttggaatcactcaaaagtccgcctggttcctctgtcacagaatcagggaagtttggatgaaggataaaaaggagaagttggacggtattgtagaagtagatgaaacctttattggaggcaaggaatccaacaaacacttttccaagaagctgaacaagggaagaggttctgtaggtaaattgatcgtaattggagccaaacagaggaatggtaatgttattgtgaaacacattgacgatacatcagcttataatttacagggatttatcggaaaacatgttgagaaaaaattccaatgtgtttacggacgagttcaagtcttacaagggacttgtgggttttgttcatgaatccgtcaatcactcagggaaacaatacgtcaacggtaatgtacataccaattccattgaaagtttctggtctctactaaagagaggttactatggcgtttaccattacatgtctccaaaacatttgaagaggtatattcatgagtttgcctacaggcataatacgtccaaggttgagacaatggattttataggagatactattactaagatgattggtaagagaataatgtattgtgatttggtttcatagtaacactttataatgaataggataatggataaataaaacccgggagatatgcaagcatatctcccgggaaatagttaacgtcccattaagaagcgaactctattttttagtccttcaggtgtaaaacccattgcacagagtccattgggtaatacagtgtaaaataaatcaaaaccgaaaacatgcttgatttttttttaccctgagggtgcgtgttgttttgttatgttttctcataatatgctccagttgagcattaacgaatttaatgctcatcaacccactatagactggaggctatgtagattctagtttttctaaagattaataattgtcaagactccacttctctggacaagtccaaaatattgattttgagcaatttgcagatcatcaaaacttcaatgaaggtcaaataccgttctcctatctcatatttggagacaaaggactggggcaaatcgcacatctctgacgagtctactcagcagaatccttcaggacatcatccagaagactatgaatgtctatttgtagacatttacaaatgtcaatgacctcggtgaaggtaagatacctttctcctacctcatatttgttgacgaaggtatgaggagtattcaggcgttctcctaagtcacgttgagtcaattttaactccaaacgtttttcttttagtatattacggagagttttctcttcaatactattcctgttcctcattttggaacaataacagagaatgagattgtaccaaatttgggtacaaaagtgtttacaagtcatttgggctgcggtaatagatcttatgtgttcctaaaacgggaacaaacacagacaagaactatgaagacattattacttggaacagtcctgacgtccttggctttgcttacctcctgcagcaagtcatcatccaatggagatggaaacaattcagaagctccagaaacattggatggaacatccttggttggtgaattgtatgtagattatcaggaaggagatggttttgagttggaagccaaagatcttaccttctcgggaaatgtggtttcattcaatacagcaacttatcctggtactgatacattagtatgggaaaatgttactggtacctatacattcgaaaaaacagggattaatactgggaagctttctgtggaaagtaatcctgtgagctataagttggatatgacatttaccaacaatcaagtacaaagctatggaataatgattgaaagtagtacaagattagaatttcccgtaaaaggaacatttaataagaaataatttattataaatgtattatgaaaacgctgactaggtattctagtcagcatttttgtttaagctgttcaccttcagacaaaaaggaaatgacgaaattttataaaatagtatggttagtcaagtatgtaggtcccaaaattatttttgacggtaatttttcagatttgcggaggttaatacctttccttcctccgaaatccttacaaatgatcctagagccattcagaataaattaccctccacggacaaggaaaacagcgtacgattgaccaaaaactcggtatcatccctccatgaagattttgtacgaagctgttttcaattaaacatttccttgtcaccactcaaaccagactcatctcttggaatcaaaggaatacgtggtaattaattctaaattgatttctacagaaattattcaggaaggaaggtaattggtaagaggaggcgttggaaaatccgtacaatcaattctggggatattcagaataaaataacctgtgtatagatgattctccatatactgccatctgctttttccaagacatgtattcttcaaatgatcctgtacaatggtgtaatgaaggaatataaaacggggttaaaatttacaaatatatcgtaatgagcaagttatgaaaaatatagtctcatacaatgtatattaaaggtaaagagagagtttttcaaatatataccactgtatacctagtattactcccggggaaattcttcaaattaacaagcataagaaaatgaataaattataagaaaattggtcttactcaatgtatgaatataataaatggataaattcccaaatgcatgattacgtatgaacaaatttcagagttttcaaggttaattatctttgtacgaaggcatttttaattaaaaccatcccaagcaattaatcctaaaatgattcctatgaaaattattcaggatatagaggaataactatagagagagcaaagagaatcctagagggattgagagcaagaacagtcaactatgaacaatgattcagaagaagaaaatcctgattggaacaggtgtgggagctacattcctagtccagatgatccccatgagtttggagaatacagggaggattggcacgattacaaatggagaaaggaacaggaggaaatgattttaggaagacgtttagcagaatcacgacagcatcgaaaatttatctgttatggcttttattacatgtcgttttgctgtaaaatacttcagacgacaattggcgatggagtcacgaaatctattgctaaagtagtaattgataagtcaacaggatattgctgtctatcgtttagaagcttcattagtatgaagcagttactacagtctatttctatattttcctaaactataataaatggctagcaaaaatcctcatatccctaatagcactgttgggcggtctcgtctgtctagtttggagatatcttcgtctaacaagacagaatactgtgagataaacggtgtgcatctatttcagggaaatagcttggagctctatgattcatggacttctcccaatgttatcatatcagatggtgcctatggagttcttggattcgaaggagatacgtgtgattattccgatttaatgctttggtacgaacctcatgttcgtgagtggagcaaccgcgcaacacctagaacaacgctttggttttggaacaccgaaataggatgggccacagtacatcccattttagaaaaatacggttggaaatatgtgaatgctaacatatggaataagggaaaatctcatatagctggtaatgtgaatacatcaaccatacgtcgttttccagtagttagtgaagtatgcgtccaatatgtgttcgagacgaaaattgatggattatcattgaaacagtggttaagaaaagaatggttaagatccggattacctttacgaaaggcgaatgatgcttgtggtgttaaagatgctgccacacggaaatattttgatcaaggccatctgtggtatttccctccatccaaaatgttcgaaaaattggcacaatatgcaaatatacacggtgaagaaataggtaaaccttacttttctctgaatggagaagttccattgagtggtgatgaatgggaacaaatgagaaattatttttcttgcccacatggagtaaccaatatatgggagcgtccagcattgcacgggcaagaacgtgtaaaaattccaggaacgaataaagcagcccatctcaatcagaagccattggacttgatggaattgattattcgagcatcttctatcgaagatgacataatatgggagccttttggagggatgtttacagcttcgctagcagctttgaacaataaaagaaaagcttttgctgcagaaatacatccagaatattatcatttgggagttgaaaggttttttaatcaatctgaattatcatttgaataattttcaaaatatcttgcaaagctaaaattactagaagactcatcattttcttgtaccgagccaccagatttagctattttggatactatttttgcccattctttaatttttttccctttatatattgtatttaatattttttccttaaaatcattaatacctctgtgtcctatcctatccattttagcgtaattagtatccaatctatattcgatggagcactcagtacgtatcttatcgcgtaattggcgtactagtttttgatagtcagagctacagctatattctttttcttctaatagttcttttgtataagctaagcattcaggactggaagtcatttgtaaaacgtaacccgttgtcgtaaactgttgtgtattttgcgctctatgagaagtttcttccggttctagtacaaggtaattagggggattatgatagtgagaatccctcgccttagcaattgataatgcagagaatgttgcaatatctaatatatatgggcttccgtatacaataaattcaggaatccaagcaacaatagcaacgttgatattgtcattttgaagatcagcttgactttctttaaatcgtgctgtgatttctgttgacaaagggaaccaagcctttatttcaatacccggtaatggttcgatgctgctttggaatacaacatcaggaaatcctggatctcgtcttacccatttgccatcggcttcttttatttcttttttattcagctcttcacaacatttaaattcaattacatttccaagtaatggtgataattttgaaatgatcaatgaaaacgatgcttctagattagcagaatcaggtgtttttaattgaacaaaatcaaaaatatgtccttttagggtatgtagattgttaattgctcctgataaaatttcttctgttgtaggcattcagaaatgcaggataacaattgcaataagaatgtccagtattctccttcatattttccccattttttccccatgcccaaacaaagaaaaaccgccatacactcattacgaatatattgcaggagaaaattaatggcggacagggagggattcgaaccctcggtaccggtttgcggtacacacactttccaggcgtgctcattcgaccactctgacacctgcccgttggagattgtgctagataggaaagcagaagcagagtaacggcagaagagaggtttggcaatcttttttttatccggaagggattttcccgttttccccgagttttttcacgtttccggctgttgctcgaaaaggatgaaaagcgccccggcagcgcgagaaaatcttcaacgggcataaacagcaacgaagcgtattttcagaagttttgaaaggaacaggtttccgtggttcacaaaaattatccatgagggcatggcagattttcgccctccctgccctgtttttcccgcagagcaaataagaatttttctctttctccacctttacggcttccgtgcaatcgggaaaggttcaagcaagaacctctattgataagcttgcttccgtccgggctccaggattgaccaacagccgtttgaggagtttcaggagcgagacggaaagagaagactgaaggattccggaagcccagggttccgagagttccggaaaggcgcggcagaaatgggaacccacgctgtgagaagagaaagcgggacatgccgtttctccgcgtatcttcatttccgcggctccgcattccttccatcttcaaaaaagtgcaaaggtttcgggcatgtcccggaaaaggcgtttcccgaccgcacttcccccttgacggatgccccaaagacgggtttgctagtcctgcgcatgggagagtccttttacacacgcaccacggaggccccctcctccgccttcgatttgtccctcagaccgcccgctttcagcgagttctgcggccaggagaagattaaggaccgcctgatgctgatggtggaagccgccagacagcgcgacgacgtgctggaccacatcctgttgagcggcccgccaggcctggggaagacgacgcttgccaatattatcgcgaatgccgtcggctgccgcattcatacgacttccggcccccagattgaaaaggcgggagacctggccagcgtgctgaccaatctggaaaagggggatattttgtttattgacgagatccaccgcctgcacccggccattgaggagtatctgtacccggccatggaggatttccggctggatattatcatcgaccaggggccgaacgcccgctccatccagctcaacctgcccaagttcactctggtgggggccaccacccgcgccgggatgctgaccagcccgctgcgttcccgcttcggcctggtgaaccggctggattattatacgcgggaggagctgtgcgccattatcgaacggtccgcggggctgctgaacgtgcccgtgaacccggagggcgccctgcagatcgcgctgcgctcccgcggcacgccccgcgtggccaattccctgctgcgctgggtgcgggattatgcccaggtgcgcggcgacggcgtgattacggagcagttggcgcacgacgccctgaccatgattgagattgacgacgacggcctggacgagatggacaagcgcctgctggaagcgatgatttacaagttcaacggcggcccggtgggcctttcctccctggcggtggccgtaggggaggacgcttccacgctggaggacgtgcacgagcctttcctgattatgcaggggtatatcagccgcacccccagggggcgcgtggcgatgccctccgcctatctcaagatgggagccgcgccgcctgccaacggccaggggtggctgttgtaagccattcatttacgacatggaaggagccctgcgttttatgctggtcatcaggccctctttcttttagactgtttccacataaaacgtcaggacgttttctgttcatcatacgcccaaagctatggccgcacattctgatattccctttaaaagactgcccgtcaagattatcggtacgggttcctatgttccggaacgccgcctgaccaatgcggatctggagaagatggtggacacttcccacgaatggattattgaacgcacgggcattgtggaacgccgcatcgccgcccctgacgagtacacttcccatatggggacgaaggccgcccagcgcgctctggaatcctgcgggctgaagccggaggatattgacctgattatcgtcgccaccatcacgccggatacgttcacaccttccacttcctgctatatccaggatgctctgggagccaagaatgccgccgcctttgacatttccgccgcctgctccggcttcctgttcgccatgaagaccgccgtccagtacatcggcaccggccagatgaaaacggcgctcatcatcgccgctgaaaaactttccaccgtcgtcaactgggaggaccgcagcacctgcgtcctgttcggggacggcgccggggcagccgtgctccaggcttccacaggggaagagggggaaggttccgtccttgccacggatatcggttcggacggctccctgcatgacctgctccagattccgggcggcggctcccgctgccccaccacagcggaaaacgcccatgaacgcctggctaccctggccatgcgcggcaatgagaccttccgccatgccgtcacgcgcatgaaggcttccgccgccagcgtcattgaacgcgccggcctcacggcggacgatatccagctgattattccccatcaggccaatctccgcatcattaacgccgtagcgcagcgcctttccattcctgaagataaggtgttcgtgaacattgagaagtacggcaacacgtctgcggccgccgtcgccatcgcttttgacgaagcgcgccgttccggcagattcggcaagggagacaacgtcgtcctggtcacattcggcgccgggcttacctggtccgccgccgttatccgctggtaatattctttttcacaccccctccatcatcatgaccactgaaccatacggcaaaaaaaatccgtttcccgctcccgtcctctccgtcaggcacatcaccggggaaggcagtcccaaggaaaccatccacattgaatacagcctggacggttccgggatgaattatattgccggggacgccctggccgtcattcccgccaatgatcccgccctggcggacgccctgattgacaggctcggcctcaacccggattcccaggttcccacgcccgaaggggaaaccgcaagcctgaaagacgccctggttcactgctatgacattaccaatgtcaacaaagccctgctgaccaagtgggccgccgcctccggcagccaggagctggacacgcttctgtccggggataaggacgccctcagcgatttcctgtggggccgggacgtgctggatctggccacggaataccccgcttccttcgaatccgcggaagctttcgtcggcatcctgaaaaagatcatgccgcgcctttattccatcgcctccagcccgaacgcccatcccgaacaggttcacctgtgcgtgggcgcggtgcgctatacggcccgtgaccgcaagcgcggcggcgtttgctccacctatatggcggaccgcctccagccgggccatacggccagggtattcgtacataccaacaagaatttccgccttccggaagacggggacacccccatcatcatggtgggccccggcaccggcatcgcccctttccgggcattctgggaggaacgcgccgcttccggcgccaagggcggcaactggctgttcttcggcaatccgtacagggccaccgacttctgttatgaagacgagctgaaccagttgaccggcaccggcaaactgaagttgtccgtggcctggtcccgcgaccaggaaaagaaggtgtatgtgcagcacctcatggtccaggaaggcgaagagctctggaaatggctggaaagcagcgcctgcttctacgtctgcggggacgcctcccgcatggcgaaggatgtggacaacgcccttcatgaagtcatccagacctggggccataaaactccggaggaagctgcggcatatgtggcggacatgaaacagcaccgccgttaccagcgggacgtatactaattcggggccttgcccctgaacctgtcactgcgcctttccatcttttctggaaaggcgttttttctttttccggagaaaacccgccacgcatcatcaatccggctccccctcccggcttccctcatgacggttccagctgttttcccgtcaatgccagtcggaacaggccaccttcccagtccgcacgacagcttctttcgagccggagaagccatcttccccccctctctccatcaaaaacaacgccggaccggagagaacccgcccgagcaaaaggtcccctccttcttcaagcgtttccttacccttattccaaatcctgccgggcgccgcaaacggcccgtttcactttcctgagcttgaaaaagaaaaccatgcagaacaaatacagcttttgcggcaggcagtggacgatacccatccatcccggccgcctcaacgcccatctccgccgaaagggataactccaccaattctgctgccggtcaatactgtctatgatttttctcctctcctccatttcggcaagcagttcttcccgcgaacgaaaaaccggagcaaggccctccagcaattccccgcacagttccaaccccgcctccttgctttttttcaactggcttttcatttccagctcccttttttcaaaggccgccgccgtccgcatgtcggcaaaccggaacgcgctgttgacagcgcaaatatttttaagcgcaaaccggtaataatataaggatatgcccggcatttcataaatgttgccctgaagccatgcgtggaaccccatcaagtcgtcttcaaaactggccgtcatccgcagggagctaccccattcgcaggcgctcttcctgatcatcatgcttcctccgtaatgggcggaagaagaaaaagctcctgcctgaagcacaacagctaggcctttccgcggagcggcaggaaaggccgggaattcaaacgcaatgctcggttcctcatagacgctggtcatctggctgaccacagccacggcatccggacgttccatcaccgcccaggcaaaaaccctgcatctccaggggaaggaacaatcgtccccatcctggcggagaatccattcatgggaagccagaccaaccgcctgccggatatgaggcccgcgccccagcggcgtttcattccggtttaagattacccggtacggccccctgtattgagccgccatttcctgcatgacgacgaaggttccgtcggaagagccgtcgtccgaaaggatgatttccaccggcccttcataatcctgcccgaatacgctccggatagcatccctgatgctgctctcctcattatgcccggtcaggataatgctgatggaagggagttccgaagggttcatgaagaaaaagcacggaaaagaaagcgtcaaccatgaaaaggaccatgtccttttctgtttattaataaggcgtcacgttcataccggattccaaatccggggtcaagggttgatttttataccaaggaacttatgttgcgcgaacgttttgtcatcaagaatctcccccttgcgggcagggagcccgaagccgggaaaacaggacgaaagattctgctttcccttactgctcccaacacacacattttttcataagcaattattttttagaatcatagaactcttagaaccagacctggccggaatacctccacaccccaccggttccatgaggtcttgggacaattctctgtccattcatgctgaatccggaatttcccaatcgaatttggaattcgctatgacaggttcattcgcgcgctgatgaatcatgggaggaacaatggattcgtccccctgccattcaccggttgcaatggttacagccccatcagaatcatgttctccatatcctgattcccgttccactcacgaagcagttcatcattccccttatatgcagaaaccgttcttcagcattattatcccggcctataatctggagaattatattgctgccgcccttcagtcagtactggttcaaacatttcaggattttgagatcatcatcgtggatgacggttcttccgatgagactgtttccatcatccaatcttttcatgaccccagaattcgcctggtttcccaagttaacggcggcgtatcgcgagcgcgaaacgcagggatgaagaaggccgtgggggcttacatcgctttcttggacggagacgattactggtatcccgagcatctggagctggcagccgattttttcaaccgtcatccggagatattggcctatgccaaccgctacatgagagatgaactggaggccatcccgccgcgccctccatcttatcccgaatctatccggagattggggatacggggagtgcttttcatgcatcccagcagtgtaatcctgaattcgtctcttgcatcccggcttcccccctgggaagaagcgatgccctatggggaagacggcctgtactggacacggtgcatgcgggggacaggcctgatcgggctgggaggctccgtcacctccatttacaggcagagagcttcttccgccatgcatgatgagcattaccagcatgtctccctccactcactcattgcgcctctgctgaatgagcttgaagccatgaaaaatcccaaatggcaatttgccgtccattatctggtcatcagggaattgcatcccaaaagactgttatcgctcaacgcagaggagcggatttccctgacgggcaggatcaggaaaatcatgcacccatgcctgaaccggccgtttttggactcctatatgaaagcgtgttccgcaagggcaggcatggaacagtcattttccgcgctcatggacagaaccatgttctcctgcaaatggctggaccgcctggaaaggatgggccgctccctgtttttccggctgcaaaccaataacggaatggagagcaaacaccaagatccagcccgttcacgctcatgaatatcgtatacgctacagacgataacggcgcgctgggaacgggcgtgagcattgtgtccctcatggagaatttgccgcccggcgttcatgccgatatttatatcatgactggcgggttaagcggggataatacggcccgtttccattccctgcaacagggctacaatctccatttgcacttcattgacatgaaggataaatatacggatttccccatcggttccaaatggtcggcggcgacgtattaccgtcttggcctcgcaggggaacttcccgccacggtagaacgcgccctttacgtggatattgataccattttcaacagggacataagccccatgtatgaatccgaattcggagattgcctcattgcaagcgttttcaccacggaagatttatccgaggagtctttttctcgttggaagagagaaatgaatctggaccgggactccatttacatcaatgccggcgtcattctttaccatatcggaagaatacgtgaagaatgttttgaatcccaggttttatcctgggcgaaaaacaatattcaccgcctttcctggcaggatcaggatattttgaatgtatgctatcagcagcgtatcttgttgcttcaccccatgtggaacatttgcgacggggctatctggtccattcgctgggaaggcgtaaaaagcttcagaaataatcccctaaagcaagcagacctgctggaagccgccaagcggccgggcattatccactactggggccatcccaaaccctggcatcccaacagcattcgccaggattacggattgttctacaagtattggaagaaatctccgtggaaagaggacatcagggatttccggaagcaaaacgatcccggccggatgttcatctccaaaatgagatgcctcctgggaaagggtaaacggcttctacaaggcaggcatcagtagaaatacggagggaaggccttatttttctgacacccggccatttacaaaaccgccttttatggggaaataccggagacggctatttttttaacaagctagctcagcttcattcctgaatttttccgaatccggaaagaaccgcccgcatacttcttcagaaacgtctcaacgttttatgcctgatgatttttccggagttttatcaatagttaaaaaaataatttatttatgaaagttgatactattaagggaagttcctatgtcatgacctgtacaaaagcttgtactgtaagcgccattttcaattccggagagacgtccatgcttattctggaagcagagaaaaaagggcaatacggttttgcggctccgacggacgccgtagaagtatccgatgaagaagccctgatcacccaggttttcaaaacagccgttccagggttgccaggccagaacggcatcaggcaaggagaaaatgccgaattaaaaaacctgacggctgagtccgggacttttgcaggggccgtcaacgccaacggaggcatcaacatcccgctggccgtgggggcgccgaccgatacgtcagcggtcaaccgcctgtacgccgccgggctggctgccgtaactgacgctttttccgtcaggtgttatccgctcctggcggattgctcgtcttccaatgggacggttttcaaaacggacagggaacccaattccctttatttcaatgtccctcccaattccgcctttaccgtgaaatgcggcctcgtgaccaacgcgaggcccatgcacaattattccagcatccgggggtgggtggccccgctgcggctgccgtctgtcagcacgaaattcacggccaggttcggccagatgacaacggttgcgcgcatggggcgggacagggacgcgtttacgctggtgccggatcaggcggtaagcggctacaggattggggagattatcgatattacgtttgatcatgtccgggacgcggatgcgggagggtatcatattcgcgtccgggagatctattattccaatgccgagcagaaatggaagatgaagacgacgcaggccctcgcgccggagacgtcttccaataccggttatcccgtctgcgtgtacgcggtggtttacgagcaataccaggacggaggatatgatactgaagacaggggcgcgctgtggctgctgcatggcgggaattcctcccgcggctgcgtcaaaatcgccacggtgaagggagtccattgctttgagaatatttatccattttccggatattatcttgatatggagaataccaacagctgggcgttggccggagcgttccttcctgcgacgatgcacttgcattgcaataacgtcaatccggcgtattacggtttttcctcaatggagagcaatatcattgtctccgaggcggtggaggattttgttgacccggaagccgaaacgactactgaagattgagcataaatgacgcagcgtccccattcccgatgcccagcaacacctctgcgtccctattcagtttttttccgccacggcaaccgggttcccgccatctccagcgcacggcgcaccattccgcgcatgccctgcgtaccgcaatacattaaaagaaccgtcacacctccataagaaacggccatgaggaaggcgcataaaaaccaggaaaagaaagacgcggaaggctgcagaggaacaaatttccagatccagcccatgaacacggccgaaatcaaaatcagcgccagctggtaaccgaattggaaccagtaattcatcacatttttcctgaatccccagttatacagcatgaaaggcttccatatgcccacaataagtatcaggctggagatgccccccagcaaaacgccgggcaatccccataagtaacctccgatgatcgctacggaaatgttgatcacgctttccgcaagaggagcccatacatcccagaacaaaccgtaaccatataaaaactgatccacaaccccccgcgtaatggtgatgaacagcctgataacgagcagcagcatgatttcccggggaaggatatagcccgctcccagccaaagcgtgatgaatggctccaaaagctggtaaagggggaaacataccgtcccggcaatcagcatgcgcagggaaaacaattcactgaacaccttgcggatttttcccgcatttccctccgcaatcaagttgcccacactggcttccgtactgccgagcagattattgaccagaaggtgcagtttctccacaacggtggaatagttgccgaagtaggccgccatctggagggaaacaaaggcatataccagaaacggcgtcacctggaactggaaaaagcttcccagccgatgcataaacaactgcttggtgtatttagtgacttcaggatattttttgaacagctccttccccagggccacattgctcttcagccagggatagacctgattgatcttccaattcaggatgaaagaataaataatgccgaagaacagctctatccctatccataaataatagcttcccgtataccatgcagacagcatctggcatatgattttgatgatggatgccgtctggaaataaaacgccactacgtaattcctctggtccgctcccaaaagggtctgcctgtagttggcaaaatacccgatcagggaagaggccagaaaggaataataagcaaaatagatgattccataggaaaaacctgtggaagggaaaataaccggcaggaaacaggaaagcgctactccagccgcaatgattatccgccctatccaccggtacatgtatcccagcacggagataatttcattaatcctggtctcatcatgttcaaagataggcttgtaaagcacatacccgatagccgtgcttataccaagttccgccaaattgaggaaattcagcagactcattaatgttcccgtcaaaccgacaaaatcggcacccaggcaattcaagaatatctttcttgaaaaaaaggaaatgagaagaatcaaaacataaaaaatgagattgaccctggcgttcaacaggcttttctttacgcgggattcttccatgttatttattccatcatccttatcctttcccggaagaaattaaaaatatctgttttactgataaccggatatttattcaaccggcaatatcccaacggcatatttgccggccatacgggcacggaaagcggtgtcaatctagcacaacatcctgccgcatcaatatctttttatgaagcctcagccaacaggcttccacaggggatagaaaccggtcagaatcgcctgttcccatgacgcctccttatccgctcaccggataaaaaacaaattcctcatttttacaggttccatggaccggaacagttccataaagtgtccttgttttattttttcttttcatctacattaccgcccgtgagcaagggcagggttctcatcgttacatatgtttttcctccggaggaaggaggcgtaggcatggctgcctatgaaatggcctgcagcctgagctccctggactgggatatccacgtcctcacccgcccgctggattcaccggatgagtccttccgctcccacccatacagcccactcacaaccctgccggacaccctgacgaaggacagtgcccgtttaagggaatacctggacgggtttctgaaagatttccggccggatgttattatctaccactcctgggcggactggtgccgggaagaattgctggacgcggcacgggattcaggcattccgtttttcctccgctcccatggtgcagctaccaatttccgctcttttttccgcttcaattaccctcctttcttcggcctgaaaaaatggctctgctccttttttcaagtacgcagggatctcctcaacgtatgccggaaatcaccgttaaaccgtctcgtttttctcgatccttacgggacactgttcaagagctttgattattactgcgcatccagaagcaaacttgcccattactcctgcattcccaacacattcccggctctgaaaagaaccgctccttttttccgggaaaaatacggactttcctccgcccccgtttttacctgccctgccggcgccagcatgaggaaacggcagcttctcttcatccgccatgtgaaacgctcccgtctgcggcatatcatttttctttttctgattccccagcacaatgcctacgcggaacaaatggaacaagccatcggggatgaccccagattcaggattctctacaggctcccccgtttggaagtagaagccgccattatggaaagcgatgccgttttcctttactcttatcaggaacagcagcccctctccattctggaggcgatgtcatgcggcgttccctggttcgctccggacgcaggagctctttccaccctggaggggggaatcgtcctgaaaaacacttccccctccgtgctggaaaaagccgtggaatcgttgacggacgaaaaaacacgcaaactactggggagtaaaggccgccagcaatgggaagcctgtttcgcccccgacgcagtaaaccaggaatgggagcaactgcttttttcctccatccgcccggaaggaaagcctccgttcgcgtcttccatcgtccgggagcatttacccacctgctaaccttgcctcctctttccaatccatgccgatcaaacgcctccgtcccgtattagccatagcagcggacctccctctgggccggctgctgacgtctttccgtaataaggaccggcgtacgattccctggattttttccctttttcatgctctggaatctcaggaagattttgacatccactggatcaccctcagcaaagccgtttctgccccggaaaccatccggatgcgcaaccagaccatccacattcttcccctgggcagcatgggcaggaatatcctgacggcccatttcctgaccgtccggagaatacgcaagaccctgaacgatatccagccggacctcctgcacgtatggggcgtggagcaggcttacgctctggcggggattgccttccggggaaagaagctcctttcctaccagggagccctcaccgcctactgccagcgcgctccgcaggccttcctcctccatatgcaggccctctgggaacggatggccgtcaaacattatgatcttatcacgtgcgaatccccctgggcgtgcggccgcgttgcggaaattgccccccatgcccgtctatcctgcatggaatacggcgtggaaccttccttttaccatcttgccagaaaaccttccccggaaccttcctgcctctttgccggaaccatttacgagttgaagggcatttcctacctggtggaggcctttacgcatccgtccctttcccatgtccagctgttcattgcgggcaacggagccctcagggaaaggctggaagccctgtccactcccaatatccactggctgggcagcatttcccgcgcagaacttcagcagcacctttccacggcgtggttcctggtgcatcccaccctgggggattgctgccccaacatcgtgaaggaggcaagagtcatgggccttccggtaatcaccacggaagaaggcggacagactcaatatgttcaggacggcgtatccggctatattgtccctgtccgcaacagcgccgccgtcagggaagccgcgcagaaactttccgtcagcctggataaagccatgtccatgggaatggagcggcatcaggaatgccgccgcctgctggacgtaaagcagacagtaaccgggtgcctgtcacgttatcataccatgctgtatccacgctgatgaaattattccttatccatctgctttccgggataggccgcctgctgctcaggctcaggggggtgcgcaccggaacaggcatcattctttccggatttcccctcattaaaaaattcccgggagcgtccatcaccatcggcaacggagtcaccatccactccctgacccggatgaatccggtactttcccatcacacctgcctggccgccctttccaatcaggcaagcatcattctggaggacggctgcggcatcagcggagccaccctggtctgcgtcaacggcatccgcatcggccgccacacgctgataggagcagacgcgctgattctggacaacgacatgcactatccccggagcggcgccaggtggggatcaaccctgggacagcccgaacagggacaacccatttccatcggggaaggatgcttcatcggcgccagggccaccatcttgaaaggagtcaccatcggctccggttccgtagtcgccgcaggagccgtcgtcacccgggatgtgcctcccggctgcctggccatcggaaatcccgcagtaaataaaccgctccccgaacgtctcaaacatccccgggaaacacaaaaagccatctgcccttgagcatttcccctgcctgcctcagggggctccaaaggcagactctttcatgacaccgcaaaatcctacaattttattaccctcatcccgggaacattggattgacatatcccgattcctcgcggcatgcctgattgtatgcgtccacgcgccagccttctctttcgccagcctgttccagcttccggttttcaacggccgcgtggcatttttcctgattctggcaggctatttcatgggccggaataattcctggaacaaagcgttcaaacggggttatacgcttctcattccctttctgttctggaatatagtcatctctttcctccatccgggaatcatgaatatgggattgccggaatacttatgcaaccttgcaggcttccgctcccttttcactcccgattttattcctctttccatcaatggattgacgggagaacccttttcccctcccacatggtttttgagggatatcattctctgttccctcatttcccccatcctgctgaaattgaaatatccggtttttgtcctgatcctgatctgcttcagcacggactggctccaataccccgtgccggccaacaagattacccttgctccatccaccgtctccctgttcagtctgggccttttcctgtcttccatcaaactggctgaagtaaaacacgtttacaaaaattcctttactcccctcgtcctgctcgccgtaggaaccgggtttctgctcagcatcaccaattacttgagcgtttgccagaataacccggaatggaacatgcacaaaatactggcatcctatggagtatggaatatctcctggccggctgtccatttgaattccctctgcccagtcttcggggcgcttcttctcatggcccttggaatctggctggaaaagaaaattcccgttgccagaaagctgtccaactatgctcccgcctgtttcctgatattcgttcttcattatcctttgatcatgctgatcccctcccacatctggaaacaatcctttttcgcgccctttgtattaataccggccatcattttccttatcgtcgcattctatcttttcctgagaaaatttttcccggcctgcctgccctacgtcgccaacgaccgcatcacccatgttcccaaaaaaaattaaggcctgtatcctctttctttttttaaccgttccggccgcattaggcgccgtctggtgcgccaaacacgcctaccgctaccatttggctgtccatccccttccctattccccggaacagggcgccctgctggaaaaacaccggcaggacaaacgcaatgcccggctgaatccccatgcccccgtgttgttcctgggttcctccaccatagaattctggctgaaagaagggaaacattcctgggaaacctggttttcccctctgggatgcctcaacctgggaaccaggagcgagaccacgggcaacctgctctggcgcctcaatgacggcctgacaagcccgctggcgcccagaatcatcgtcctgtattcgggagtcaacaatctgggagtacaaaaaagcctgggatggacggcttttcagggaaacgtggccatcgtcaaaaaaatcagggagatttacagcccggaaacgaccgccatcattgtcattcccccgctcatcgcacaaaaagggtcgcgcatggaaaccttcaggaattgtctgctgcaacacgactttggagaaaatgtccatgtcctccccctccatttcttccttccgggaaaagacgccagcctttatacttgggacggcctccatctcaacgccctgggatatgaagccatttcgcctccgcttttccgcttcctccaacagcttttaagcaggagcagcttttagggcttcacaggaacaacaaactttatccgccattactccacgtgatgattgaatcttctccaccccatcaggcaacacttcccatgaccctgtttctggcaggtcccaccggatcggacaaatccgcggtagccgtggaactggcggagatgctggacgcagaaatcgtcagttccgacgcttaccaggtgtaccgggagctgcccatcctgacggcggcgccttccccggcagaccgggaacgggtcccccaccacatggtttccatcattccggtccaaaagaactggaatgccacggaacactaccaccgcgccatgcgctgcatggaagaaattcacgcacgcggaaaaatcgccatcgtcacgggcggttccggcctgtacttcaaattcctctcccacggcctgtcggaagcgccgccgggggacgctgctctccgcgccgctttcgcgaactgttccacggaagcgctatacgccagactctcttccctggatccggaaggagcggcctcgacggatgcctccaaccggcgttatgtggaacgcaatctggaaatcgtccttgccggaggaaaacctctttccttctggaagaggaactggttgaccccgccgcgcgggcccggctgggtcatcagcagggatgttcctgaactggacgaaagaatagcccaccgtgccgcacgcatgatgcaggagggggccgtggaggaaacggcttccctcggcccatgctccgccacagcggaacgcaccctgggcctggcgttgatacgaagcatgctgcgcggggaaatctcccgtgaaaactgccagggccaactggccctcgccacccggcaatacgccaaacggcagcgcacctggctgaaacgcgaacaatggcttcggaaacttccggcttccccttccgactctccccgggctcttgcagaacgcatcatggaagaactggaacattcacccttgtccatacggcagtaaatatccggaaccgtcccacaacggggaaaatgccagacgccatccatgatgcatgccgcaacgaaccttgaacacaggatgcgcatggcaaattgagcttacgccacccgcttaaaagccagagatctgtcgaaagctccgccgaataaccggatcaggatgcctgtcttccgcgctttttgtcttggcttacggaaacatctttggtttacaggggcaggcggcaaagcctttctcaaagcggtccgccttatcacccccatatcttttccagcatcgtggcacgcatacttgtaggcttatcaggcggagtggacagctccgtggcagcggccctgctcgtggagcagggccatgacgtagtgggggcctacatgaaaaactgggtgaatgacgaaggcattcccggcgaatgcccgtgggaacaggacattcaggacgcgctggccgtcgccaaaacaacgggtattgaattccgggtcattgacctggtggacgaataccgcgcccgcatcgtgaattatctgattgaaggctaccgcgccggatatacgcccaacccggacgtattgtgcaaccgggaaatgaaattcggcgtctttctggattatgccctggaacaggggttcgactacgtcgccaccggccattacgcccgcaggatggacacgccgcaaggggctttcatcctgcgcgggcgggacccgaacaaggaccaatcctacttcctgtccctgatgcgcccggaccagatagcccgcgccgtctttccccttggggatctgctgaaaccggaagtgcgcgttcttgcggaaaaatacggcctccccacggcacgcaagaaagacagccagggcatctgtttcatcggccaggtaaagatgagcgatttcctgcgccactacctgccggacaagcccggcaaaatcgtggacacggaaggccggacgctcggcacgcacaacggcctgcatctgttcaccatgggccagaggaaagggcacggcgtcgcctccccgcgggagggagtcgcctatgtggtggtgggaaaggatgtccagcgcaaccgcctgattctgggatacgaagacgcgtccacgcggggattgtacgcatcccgcgccgtggtcggcggcatttccaatacgctcgctcccctgccggcccgcgtcatggcccagccccgctaccgggccaaggcggaatgggcctcctgcgaatatctggaagaaggaaaggtgcgcctgggctttgacacgcccctccgggccctggccgtgggacaggtctgcgccttttacgacggaggcaagttgctcgggggcggcttttttgaatccatagaaccatgactgacccggaacgcaccatagccgcacaggccaccgccgcaggacagggggccatcgccgtcatccgcatgagcggttccggctgcatggacatcctgaaacaatgcacccctgcggccttcacggaacgcctccagccgcgcagggcgacgctggtttgcatccgggacgcggaaggagccgccattgaccaggcgcttgtcacctggttccccgccccggccagttacacgggggaagataccgcggaaatatcctgccatggcggcatgctggtgacggaccgcctgctgaaacgcctctaccaatgcggggcctccccagcggaaccgggagaatttacaaaaagggccttcctgaacgggcgcatggacctgacccaggcggaagccgtaatggatgtgatttccgccgggagcgacctggccctgaaagccgcgcaaacccagctggacggaggcatcggcgcccaggtggacgaactgaaagacaacctagttcatgtgctggcccacattgaggcctatattgattttccggatgaagacatttccccggacaccgcctccgatctgctggcgcgcctccggagcatggaggaaaagctggacactctcctcaaaactgccgaaggcggacgcctgctgcgggaaggcatccgcacggcgatcgccggacctcccaacgtgggaaaatccagcctgctgaataccctgctgggatatgaccgggccattgtcagcaatattgccggaaccacgcgggacacggtggaagaatccattcagctggccgggctggccctgcggctgattgatacggccggcgtccgcgaatcttccgacgtcattgaacaggcaggcattacccgcaccaacagggcgcttgaaaccgcggatctggttctggaagtggcggatgcctccacgccccggatcaaagacttccccgcccctgttctcaccgcgccccggctgctcattctgaacaagtgcgacctgggaatccatccggactggaaggccgtgcccggcatccggttttcctgcgccaccggggaaggaagaaaggaattggaggaagccattatccaggccttttcctcctccctgcccggtgaaacgggcagctccctggtagtcatcaatgcccggcaccagcatgaactgggcctctgccgagagcatgtccggctggcttcggaatccatctcccgccaggaaagtccggaattcacagccctggaactgagagaggccctgacgcacctgggggaaatcaccggagccgtggatacggaagacgtgctgggcgctattttttcctccttctgcctggggaaataaagctccggaaaatccggacataaccattcaacaaacagctcttatctttttatcatgcctcctcccgccgtcaaatccgtccgccagatcatttattaccaatatgccaaaatcattgcctcctcctccggttttggaaaggctcattacggcatgattatgagcaagtggaaggatctttgcgcagggaccatacattggtcttcctccgtacgcgaatgggtcagggaaagggaacatcccggggaatgtatttattgcggcggaaacaaggatttgaccacggagcatatcctgccgcgcgcctgcgggggagaagatattacggacaatgttgtcagggtatgcaagtcctgcaattcttccaaggggggaaaacggctttacgaatggaaaggattaaaggaaaaggataaccaccaccgtatcgcggaaggaaaatacctgaagtacctttattcccttcatgaaaaacggggaaccctggatgtaacaaatgtgcgggagctgtgcccgcattgcaacatgcgctcctgctgtgaacgggacgggacggtggagaagctttccgtttattgcatagaaggatgtttccacaagtagcgcgtattaccggccgccgggcttcctggaaaaaatttccttttcctcttcctccaaggcttccggctccgcatccgaggtgaataacggaatgtaggaaggcaggttccagttccagcggatggccgccaggcgtacggaaagcgtgaccatgaagcccgtcacgaagcaggtggaagaatcaattccggcatagtaaagcaccgcgtacgccacgcctcccagcagggccgcggtggcgtatagttctccgggacggaacacgtagggaacgttgccggtaagcacgtcgcgcagcaggccgcccgccacgccggtacaaatgcccatcatcacggaaacagtgggcgtatagccgtggagataggatttttccgtgccgatcatgccgaaaagggccagaacgatagcatccgccacgcggatagtgcccatgggaggcggatatttctgggccacataaaaggttgccagactggtgacgacggaggccagaacaaaaatttccccggaggggagcgtccagtacaccggtatgtccagcaggatgtcgcgcacggttccgccgcccagcgcagccaaggtgccgcagacaatcacgccgaacaaatccattttcacccgcgaggaagcgatggaacccgccagggctccaataatcgtgctcatgatttcacaggtggagaggaacatggcgggaggaacaggaaaaaaggcatattcagcagacccgtatccacggcaggcaggagtcctggctggcgcagaacagggaggtggaagccagccccatgtcatgcagggtatcacgcatcaggctttctgccaatgccggagaattgctttctacgctcagatgggccagcaccacgtttttcaaggctccatgagcaatccgcctcagcaggtcgcacgcctgcccattggagagatgaccgtgcgcagaagcgatgcgctgcttcagcggccagggccttctgggagtggccgccagcatgtccggatcatagtttgattccaccaccaggctgtccaccatggcaaggtattccgctatgcagccgggagcctgccctgtatcggaaatgaaacccaggctggaccgctccgtttcaaatttgaatcccaccgggtccacggcgtcatggtaagtggggaagggagtaatgacgatatcccctattctgaaagactgccccttttcaaaataggcccagggagcctccggcgctttttcctggacgcacatggccgtatggcgggtggcgtaaacacgcacggcatgctttctggtgaactggtgcacgcctttcatgtggtccgcgtgttcgtgggtaagcagaatggcgtccagctcatccggctccactccggcggacttcatcttatcccgcagcctggcggcgctgaacccggcatccaccagcaggacggtttcccccgccctgacaatggtggcatttcccccgctgccgctgcccaacacgcaaaactgcatcatgcgcggaatataataccgcccccggaagggagcaagaacgtatccatgctttttttatgacatgagcacatgaaaaaatacttttttccagtacggggttgacatttcaggtgcattaaagtgtattgaagtcactacgtagtgtacttgcatgcgatgagcagtgtatcagacaacctttttggtgcatacacgcacaagctggaccccaaaaaccggattgccattccggccgaatggaggccctccgaaggttgcgccctgctcctgttatccggtaagcgtcttgatttgccgaccgtcaaagcctatacgcgggaaaaattccagcaactcattgacaagatagaaacaacgcccggctacacggaagcgcaaatcgacctgttcatcggcaaattatacgccaactgtgtggaggctgtcatcaacgcccaaggcaagctgctgatacccaaacaaatgtgcgaacacgcacagctcagttcctccgtccggctcgccgcacggagaggatatttcgaattgtgggaaccctctctctacgaagaagtttcccggcgtgaaaacgccagcatctccgacatcaaccaatcctacggcattctctagctttccttcatgcccccagactcctccattacgcccaatccccaggcacgcccctgcgcaacgcttgcattgcgcccgggctggcttgcttccggcctgggcgtcggcgccagaaccgggctgcatgcggaactcacggcttattccatcgttttctgggggcacgatgcccttccggcgcaggatatggttgcctggcagcaggaaaaggcacgcctcatggcggagatgtccctggccgggcaaaagggcgcctatggcaagctgggcgcattgtcttccggcctgacccgggcttttgacgaccatattgagctttctttacgcgcgggcgcgggtacgcacgtccgcacggaggaggtgcaggccctggcaaacgggctcgcggaagaaacgtcctgccgcgtgctggcgtggagcgtctgccgcaaccatgtgcatgtgattgcggagctgacggaggaaaaaggagtggatgaactggtctgctcctggaaggcgctggccccctccatgaactgggaagacgcgtaccacacggaagccctgaaagcccgggaagccgcggccagggtagacgccctgatttccgaactgggggatgacgccgctgccgccgttgatgcggaagcggacggggcagactccggaaacggcttccggcacattaccgtgctgctgcatgagacggtggacatgctgaaggcaggacccggcaaattcatcgtggactgcacgcttggcggaggcggccatacggaacttctgctggagcagggagccactgtctggggcattgaccgcgatgcggacgcccgccgcgccgccatgctcaggctggcgcgcttcggttcccgtttcaaagtcctcgcttaaaccttccaggacgtggaaagcattctttcccagcagggggtttcccgggtggacgggctgctggcggacctgggcgtttcctcccaccagcttgacaccgcctcccgcggcttttcctttagggaagacggccctctggacatgcggatggatacccgcgccgctctctctgcccggaacctggtgaatgaggccccggaagaagaaatcgcaaatatcctctggcaattcggcgaggaacgcgcttcccgcgccattgcccgcgccatggtgaaagcccgtgcccaggcacccatcaccacgaccgcacagcttgcccgcatcgtggaatccgtcctgccgcgcaaaggaagacaacaccccggcacccgcacgttccaggccctgagaatagcggtcaacggcgagctggatgccctggacgctctgctggattcctccgtgcgtctgctcgggcagggggggcgcatggccgtcatcaccttccacagcctggaagaccgcagggtcaagcagttcttcgacctccggagccgtccggaaatagaccgcccggaatggcaggcaccccgtcccaacccggattactgcttccgcccgctttcccgcaaacccgtcactgcgggagaagaagaactttcaaccaacccccgttcccgcagcgccaagttgcgcggcgtggaaaaaatcatctgaccatctctcttccgccaccgccatgaaaagattcaaacagcgtttcaccggccaccagatcagcgtgagcatgatcatgtggctcattgccttcgccgccctcacctgcggagcgggcatcacttatgccgtgctgaaaaacgaccagatccaggtcgcgcgcgacatcaagcaaatgaacgaagagatcgcctcctgcgaactcacaaaggaatattaccgttccaagacttcctccttgaccagccgctgggccatccgcgacaggctggcccaggacaagtccaacctgcagcctatcgagccctcagccgtagaatacatttcttccgaaaacgcctcccgcatcgctgcggcaggccattaactgcgttgagccgttcatgatcacgatcacgaagtccagatttgccagaagaagcctcgtcctgtgcggcctggcgggcgcggcggtcatctggctgatgttgtcgctggtcaatctccagctggtttccccccggaaaacgagcggcgtttccagcggcggcattattgaacgggaggttcttttgccccagcgcggccgcatcatggacgccaatgaggaaatcctcaccagcaacatgcagagctccgagctgattgcggacggctatcatctgaacgaccccaagaccatcagctgggctctggcctattccaaggccgtccattccccgttctgggagaaagccgcaacggataaggaaaaggaaaagctcgtttccggcttccgtagcaagattctgggccaggccgccagcaaaaaggacggcagcaaggaacataatctggcgaaaatcctgctggaagagcctgaagacggaccggaaggggtagatatggccagaaaaaagctggaagagctttatgagccggagatggtgaaagaatacgtgcaggcgcacctggaatacgccgccaaagtgattgcccctttcctgccggacatgagcgtgcaggacatcatcaacacggtggaaaaagacggggcgattcccaagaagcgcatcgtcattgccaaaaacctgtccgaggaaaaagcggaactgctgcggcaggctatccagaacgcccgcgtccaggggttccgttttgagacctcctccaaacgcgtctattccgtgccggaatgcatggtgcatattctgggctacatcgcccagacgaaggacagcggcccccggcccatagccctttccggccttgaaaagcagctggacgaccagctgctgggccacaacggcatcagggaataccggaaagacagccgcgggcgcatcattccctccgcggattcccgcttcaaggatgccgtggacgggctgaacgtgcgcctgacggtaaacatggaataccagacgatcgtggaggaggagctggacgccgccatctctttttacacggaccagacccacaaaccccgcggctgcattattgtggtggaacccaagaccggcagcattctggcgatggccagccggccccactataatttaaatacgcgcgagggccttcaggaaggcgcctaccatttcgccgtgcagtccctgtacgaacccggttccacttttaaaatagtttccgtcacatccgccgtggacagcggaaaggccacgttcgacaccatgatcaactgcaccccttatccggtgcccggttcccgccccgtcacggacgccccccgttcctatggcggcctgaccgtagcgggcgtgctgaaaaaatccagcaacccgggcgccttccgcattgcactgaaatcgggttggcccacgtataaaaaatactttgacctgtacggattttcctccaaaacgggtatcgacctgccgggggaaaccaacagccagtgccaggacggcagcaattttgtcaacttttcccgcatcagcttcggctactccctgatggtgtcccccctgcaggtcgccatggcttatgccgccatagccaatgacggcgtgcgcatgcgcccccggctggttgacggcatttatgtggatgacagaaacttccagccttccccccccgtggaggtatgccgggtcatgagcgtcaagacggcccgggaccttcggaacgccctgttccacgttacggatctggacgggaccgccaaaagagcgcgggttgaaggctataacgtgggaggcaaaaccggaaccgcccacaaggtgaagcctacaggcggctattttgaaaaccgctacaccgtctcctttgtaggaatgctcccggtggaggacccggccttcgtctgccttgtcgtcattgacgaccccacttccaagcattgccatcccggaggcggaaccgtatgcgccccggtcttccagaaactggccacccgcctggcggccgccatgaacattcctaagaacgtcccttccgcagaggcaaataaaaaagcctcccgtgcccaggcctcttccacctcatccaaaccgccgcgcagataatcccgtcatgaagctacttaccttactcaaagaccttccctcccatacgctcaccggctccccccaggtgaaaatctcccatctggaatgcgacagcaagcgcattctgcccggttcctgctacattgccctgaagggaacccgggcggacggccatgaattcatcccggaggccattcgccgcggagcctgcgccgtcgtcgcggaaatgccctgcacgcaggaagccagggaagccggagtcagctgggtggaggtgaacgactcccgcctggccgtcagcctgatgggcgcggcctggaacggacgcccttcccgccacatgaccatgatcggcgtgacggggacgaacggaaaaaccacaacggcctacatcgcccattccctgctcaagcagtcctggctgcgcgctggattgatcggcaccatcgcctatgacaacggggaggaaatcactccttccacccataccacgcccggaccgctggaactggaacacctgctgaaggaaatgtatgaaaacggctgccgcggcgtctccatggaggtctcttcccacgcgctggaccaggaacgcgtggtaagcatcaatttcaacgtgggcattttcaccaatctgacccaggaccacctggactaccatcacaccatggagaattatttccaggccaaggcgaaattgttcgaacagatggcacaggacaccaaatcccggcgaaaacccgtggccgtcatcaacatcgacgacgcttacggccgccgactggcggaaatgttttccggccgcatgaccgtaaagacctacgggtccgccctgggggcggatttccgcatgctggtgcaccacgccaccgccaaaggcagcgagtacgaattggaatacaaggggaaaagctacctggtccgtgtccccctgatcggcaagttcaacatgtacaacagcctggccgcgctggccgccgtcatttgcgccagcatccccgtgcgggacgccattgcgaaccttcagaatattccgcaggtccccggcaggctggaactgttcacccaccccggaggcgcccagattttcattgactacgcccacacgccggacgccctggaaaacgtctgcaagacgctcaaggaactgtgctcccgccgcctgattaccgtgttcggctgcggtggggaccgggacaggggaaaacgccccctgatgggagccgctgccgcgcgcctgtcagacgcctgcatcgtcacctccgacaatcccagaagcgaggaacccctctccatcatcagccagattgcggcgggcatgccggaaggcagatacgccatcatcccggaccgggccagagccattgccacggccatcgagcaggcccgtctgggggacatcgtcctcattgcgggcaagggccatgaaaattaccaggaactttccaccggccgcattgatttcagcgatgccaaggaagtgcgccgcaacatgttcatcaaggaacgggaagaattcccccaggcataacacgttattccgtctttctttcatgatttccctcacggcacacggcatcagcaacgtcatcggcggaaaactggtcagcggccccttcgacagggtcgcttccggcggcgtgtgcacggacagccgccatttgccgccccatgccgttttcttcgcgctggggggagaaaaatttgacggaaacctgtttgccccggaggcatcccgtactgcggccgccgtcgtcgtcagccgtgtggaggaaggcatggacccctcctgcgccgtcattctggtggaagacacgctggaagcccttcagaagctggcctcctggtggcgttcagagcttaccctcaccgtcatcggcctgaccggctccaacggaaaaacctctaccaaggatctgacggcctccgttctttcacaggggttccgcaccatcgccacgcagggcaacctgaacaaccacatcggcgtccccctcagcatcctccgggccaccccgtccgacgaagccgccgtatgggaaatgggcatgaaccactccggggaactggctcccctgtgtgaaatgacgcgcccgaaaatcggcatcatcaccagcatcggcacctcccacatggaatatctgggttcgcgggaaaacatcgcccgggaaaaatgcacgttggcacgctgcctgccggaagacggcttcatgatttttccggcggactgcgattatgcggatatgatccgtcaatccacccgcgccgcctgtattgactgcggcattggcgccggaaccgttcgcgcggaaaatcccgtctctaccgagaacgggacacgcttcatcctttccatcccggatttctgccgggaagaggtggaattgcccgtccacggtcggcacatggtaaccaatgcgcttctggccgccgccgctagctgggcggcaggtcttgcgaaagagcaaatcgcctccggcctcaatcaggcgcggctcacgggcggcaggcttcactgcacccggatcaacggcattctggtagtggatgacacctacaatgccaacccggattccatgcaggccgccctgcataccgtagcggggctttcctgcaccggcagacgctttgcggtgctgggcagaatgggggaactgggcgcgttttccgaggaagggcacgttctggtgggccgcacggcggaagagctccgtcttgactgcgtcgtcagcgtgggaacggatgccgcccggattacggacgctatttctccgaacgccttcactcaaagcctgcatttcggctctgcggaggaagcggcagaatggctccgcagccatacgacgccgggagacatcgtcctcttcaaaggcagccgcctcgcccggatggagcaagtcatgaacctcacctttccgccacagtaaattttatgcattccgttattgaacagttcagcccctcgggggcatttgcagaaccggcagggagggccctcctggcctgcctggtttcctttgccctgaccatgatattcgccccgcgggtcatccgggcgctgatttccctgaaaatcggccagcccatcaggacggcagaagaggtgcacaagctggcggaactccacggggccaaggcgggaacgcccaccatgggcggcgtgctgatcgtagggtccatgacggcggctaccctgttgtgcgccagaatgggcaatccctttatcattgcctgcctgatcgtcaccctggcgctgggcctgctgggattccgggacgattacctgaaggtggcgaaaaaaacctcggacggcatttccgcacgtaaaaaactcctcgtccagttcctggccggcctggctggcgtcaccttcctgtacctgtacccggaaggcaatccccgcgtggaacttcacgactacatatcctccctgttcattccgttctatggccaggtgaacctgccatggttcgtttatattcctttcggcgtcgtggtggtcatgtccgcctccaatgcggtgaacctgacagacggcctggacggcctcgcctccggctgctccgtcgccacgggcattacttacgccatcattgccgtcctctgcggaagctggctgacggctgattccctggatattcccttccaccccggcgcgggagaaatcagcgtcttcatgatggccctggtaggggcctgtctgggcttcctgtggcacaattgctacccggccagggtatttatgggagacaccggctccctggccctgggcggagcgttcggcatggctgccgtctgcacggcgcaggagcttctctttatcgtcatcgggggcgtcttcgtcatggaggccgcgtccgtcgtgctgcaggtaggcagctacaagctgcgccacggcaaacgcatcttcgccatggctcccatccaccaccattttgaactcaaaggctggaaggaaacgcaggtgattgcccgcttctggatgatcagcctcctgctggctttcctgggcctttttctgattaccaccgcctgacaaaccacgaacatgcagctcaataacctcaacatcgccgttctgggagcgggaagaagcgggcgcgccgcggcgcgcctcgccataaagcatggcgcacgggtatgcgtgtttgacgcttcctcctccattgacggatggccggaagacattcccctgcataccgccgccacagaggaagacggacgcgcctttcatgcggatatggtggtcatctcccccggcattgagacggatagcccctttgtcaaatcctttggacgggaaggcgtggaaaccatcggtgaaatggagctggcatgccgcttttaccatggccgcatcatcgccatcaccggaaccaacggcaaaaccaccaccacatccctggtggaaaagattttgctgcgcgccggaaagaccgccgttgcctgcggcaattacggcgtgccggtagcggaaatcctgctccgggattccgtgccggacgtgctggcgctggaggtcagctccttccagttggaaaccatccgcgattttcacccggatgtggccgtatggctcaattttgcgccggaccacatggaccgctacaaatccgtggaggattaccaccgcgccaaactccatatcttcgacaaccagacggaaaaagacctggccgtcgttcgctccggggaacggcttccgcacctgaaagcctccgtactcaccttcagcccggaagatccggcggctgatctttattaccgcgaaccgttgatcctggagggcggcgctcccctgctgaacctggaagggaccgccctgaaccagcgccataatgcggaaaacgccatggccgccgtcctggcatgccgccacctgggcattcccacagaaacagctacagaagtactgaaggagttcgcgccccccggccaccgctgcgaaaccgtccgcacactggacggcgtgctgtggctgaacgattccaaagccacgaatctgcatgcgctggaagcggctctgaaatcacaacattcccccgtcatcctgattgccggaggcaaggacaaggggctggattacgtacccctgcggcccatgctgaaagaaaaagtgcgcgcctgcgtggtattcggccagattgcggaccagctccagcacgctttttcccctgcggtccccacggaaaaagccgcagatgtagaggcctgcgtggcgaaggcacgctctctcgcccggccgggagacaccgtcctgttctctcccggcacttcttcctttgacatgttcaccggctatgttcagcgcggccaggccttcagggacgcggtgaacgccccttcccccctttcctgacaattcaccagaaaacgaccatcatgaaaacgaccaagacacctgatcacaatccgaccggacgcacccgtccgaaacgcaaaatgggcaccgtactccgcgccaaactcagcaaataccgcgcccgcgtctccgaatttgaagatgacgcgcccagcagcaccgtcgtgcgctggctcgtcgtccttcttcttcttcaccttctcgtcatcggcggcgtttacgtccgcagcacctggttcagaaacacggcggaaaccgtagaaatggcagccgccctgcccgcgccgcccaccgtcccgcagcgccccgctcccgcagcgcccccggccgctctgccccaggttccccaggccccccccgcagccccggtcaccatcacgcagccggaacaggtagtggacgcgcggcccaacaggcagccggcccctgcggtggaggaacacattccggatgcagccccggtggcaggtcctgcgcgccacatcgtgcgcacgggagatacctgggaacgcgtcgcgcgtgacaaccaggtggccgtcaatgacctgaaagccgtcaatcccaaagttcagcgccttgtcagcggaagcacgctcgtcattccggcccggccaggagacaaatttgaaccggaaaagtccgccgcggaggaattggagccggaaggcgtgccccacattgtgaagaaaggggaaaccctctccgtaatcgcccgcaaatacaaaatgaactggcgcacccttcagaaattcaacaagatgaatgaccgggacgtagcgcgtctcaaaatcgggcaaaaaatcatgatccccaaaaagtaggcctcttcctgcccttccgccgccatgtcttccaaagtctgcatgattctggtctggtttttcgtcatctgccttctggtcgtaggcctggtgatggtatccagcacggcggcgtgggcggaggaaaccaagcacccgtatgaacccctgttcaagcagaccgcctttgcctgcgccggtctggtgggggccatgattctctcccggatagactaccggatatggaggaagtatatctggtggatccttgggggggcctgttttctgctggtgctgtgctatgtgcccggcatcgggaaggaaatcaacggggaacgccgctggatcaccatcggcatgcagttccagcccagcgaatgcgccaagctctgcatgatgatggccctggccaactggctggccctgcaccgggaccgcaccacctctttctggtggggttttgtgatgcccggccttatcttcggcattcctcttgccctgattctttttgaaaaggacatgggcacctccgtagccctggccctggccgcgttctgcgtcatgtttgtggccggaacgcgcagaatttacctgggcggggctttcgctctggccggaacggccctgtacgttctggtgcagagcaacgccaaccgcctggaacgtttcctggcctggaaagacctggacgcccaccgcctgggcgccggcctccagcagtaccgtgcttccatcgccctgtcccgaggggggctggacggggtgggcctgggaaacagcgcggaaaaacacggcacgcttccctttgcccacacggacttcattttcgcgccgctgggagaggaattcggtttttacgggaccatgttcgtcctgctctgctatttcctgatgacgtatgccggcatcggcgtggccatgcagtgccgggacacctacggacggtttctggccgtggggattgtcgccatcattttctgtcccgccatcctgaacatcgccgtggtaaccaacgccgtgcccaattccggtctgccgctgcccttcatcagcttcgggggcaccaacctggtctttacgctggccgccctgggcatgctcaccagcatccagaggttttccaccggcgcccagcccaattgtgaaatcacccgcaaagacgaacgctccattgacgtaagattatgactgaaccctctctcaaacatccctccctgaacatcgtgatcgcctgcggcggcacgggggggcacctttttcccggcatagccgtagcccaggaacttaaaaagcgcggccaccgcgtcacgctcctcatctcccagaagaaagtggacgcccaggccagcaaaaattacggggatcttgacttccgcaccattgaggccatcgcgatgcccaaaatcccatccctgtccctgctggggttcggcgtcaggctgtacaaagccatccgtttcagccgccatcttctggacgaggtggaagcggacgtcgtcatcggcatgggaggattcacttcattccctcccgtttacgccgcccaccgcaagggaatccgcacctacgtgcacgattccaacgcgctgcccggaaaggccaaccgcatgaccgccaaatgctgcacgaacgtgctgctgggcattgaggaagccaggcactacttcaatcccgccaaatgcattgtcaccggcactccggtacgccaggaaatggtggcccggaaagacaaaaacgaagccagggcggagctcaacctgccccaggaccgccgcgtggccctggtaatgggcggttcccagggggccaggaatctgaattccctggtcattgaagccgcccggcaatgcgcagacctgtgcgactttctcatcatcaccggctccgcggactttgcgcgcgtcagccagctgacggcggacatgccccacgtgcacgtcattgaattctgttccgccatggctgccgcttatgccgcagcggatgtggtcatttcccgttccggggcgtccagccttacggaactggcccatatggggaaggccgccctgctggttccctaccccttcgccgcagacgatcaccaggcacacaacgcacgcgttttcgcggcccacggcgcggcgcgcatgatgcgtgaaaacaccctcacgccggacgatattgcggctttcctgaatgaagtactcaaggattcctccctgctggcctccatgaatgaatgtgctttacgtctggacatgcctgatgcagtatcccgcatcgccaatgtcattgaacatacggaccatgcagccccccatgattgaaaccttacgcaaaagactgacagacagggaacacccggcacgcctccatctcatcggggtagccgggtcaggcatgtccggcctggcgctcatgctgatggaaatggggcaccgggtgagcggctgcgaccgggtgaccagcgcggagaccgaacggcttcaaagcctggggctgtctttctcctgcccgcattccgcagacgccgtttccgatgcggaaattgtcatctattccagtgccatccgggcggacaatccggccctggcggcagcgcgcaagctgaatattccctgcatgcgccgcgcggaatgcctggcggccatcctgaacgggaagaaaggggtcgtggtctccggtacgcatggaaaaaccactacttcagccctctgcgcgcacctgatgagggaaggccgcatgcgtccgtgccactacgtaggggcggaaatccccgtgctgggaaccaacgcccactggaatgaagacagcgaatacctggtggcggaaggggatgaaagcgacggcacgctggtaaattacattccggagcacagcatcgtcctcaacattgaaccggaacacctggaccactacaaggatctggatgaaatcaaggccgtgttcgaccggctttgttcccagacgcgcggcaagatcatctattgccgcgcgcatcccggcgctgaggatgtctgcgccaagtaccccaattccgtttcctacggctggtccgatgcggactacaccgctacggacgtgctggaacgccgcggacgcaccctgttcaccgtgttgaaggggaaagaagaactgggccgcgtggagctgggcatacccggacgccacaatgtcctgaattccctggccgcgattgctctggcaacggaactgggcgtggatttcccggcggtgacgcggggcctggcctcctttgcgggagccaaacggcgctttgaaaccaaatacctttcctcctccatccggattgtggacgactacggccaccacccaacggaaatagccgccacgctccaaactgcccgttccctccagccgaaccgcctggtagtttacttccagccgcaccgctacacgcgcacgcagcttctggcggatgacttcggcaaggtgctccaggaggcggacctcgtttttgtagcggacgtgtatcccgccagcgaactgcccattgaaggggtaagcgggcagacgatcatcaacgccatgcacaggcacggccccgtggaaacccgttaccttcccgacctgggcatagcccaccacaccatcggcaacgcgctgaaacccggagacctgttcctgacgttgggagccgggaacgtccatgaatgcggcatgcgcatcgcgcgcgacctggccctgctggaggatctggaacgcactgcgggcggttctctggaaggcaagctgtacgaacccatgtcacgccataccaccatgggagtaggcggatgcgcccagtactggctggagccttccaccttttccggaatgcaggcggccgtcaactattgccgggacaggaatatccccgtacacgtcattggccgcggttccaacatcattgtcagggatggcggactgcgcggcgccgtcatccacccctccgggggaagattcgatgtgctggaaatccaggggaaccgcctcaccgccggagcgggcgtgcggttgaaaaaactggtttccactgccgttcagaacggccttggcggcctagaatggatggatggcattcccggcaatgtgggaggaagcctccgcatgaacgccggagccatgggcatggatatggtcaaaaacctcgtttccgtcacctgtctggatgaagacggggaaatccgcagccatacaagggaagaattgaacgcccagtaccgttccattccggacctggtccacaattttgtgcttcaggccgtgtttgaggcgcagcccgcccctgcggaagaaatggagcgtcttctggaggcggcacgggccaagcggaagctttcccagcccgtcggagccagcgcaggctgcatcttcaaaaacccgccggaaatcccggcaggcaggctcattgatgaactagggctgaaaggcgcctgcgtgggagacgcctgcgtatcagacgtgcacgccaattttatcatcaaccggggtcatgccagagcgagggacatcaccatcctgatcgacatgatccgcaaggaggccatggaaaaccgcggcatcgacctgaaatcggaagcccaggtcatcggagaccgggacccccagttttaacccattcactatttattccaatatgaacactctcaagcgcgacctcaaaatcgccctcctgctcggaggtcccggggcagaacgggaagtatcccttgtttccggcaactccgtttacgacgccctgtgccgggccggattcaccgatgtaacgaaggtggacgtgcacggcccggatttccggctgccggaaggcacggagctggcttacaacattatccacggcactttcggtgaggatggaaccctccaggccattctggaagaacgcggcgttccgtacacaggggctggctcccgttccagcgccctgtgcttcaacaagtcagaatccaaaaaagtttttctggaagccggagttcctacgccgcatgcggaaattctggactgttccaatggcatcgtgatgccgtccctccccctgcccttcgtcatcaagcctccctgcgagggttccagcgtgggcgtccacatcgtccgcaggcaggaggatgtgctccccgccatggaggaagccgtaacccacggcaccaccgtattggtggaagagttcattcaaggcaaggaactgacggtcggcattctggacgggaaagcccttcccgttattcatatctgcccccgttccggcttctatgacctgagcaacaaatacccgtggatgaatatgggcggcggcacggattatatttgcccggcggatcttccggaagagaccgccgccaacgtgcaggaggcggccctgaaagcctacaaggccgccggcgtggaagtgtacggccgcgtggacgtactgctgcgcgaggaagacggcgcccccttcgtgctggaaatcaacaccattcccggcatgaccccttccagcctgcttcccaaggcggcggcggcctccggatggccctatgaagacctctgcgaaaaaatagcggaattatcgctagccaccccccgtaaataacgtaatatctgacagagggcggggagtcgcccctcccgcaccccccgatgtcgcacaaagccacaacgccagtcccccgttccgccaaaaggccggaaatgcttcttctggaacgggaggccagaaaagagaccatcgaacgcaagggcaaaaactaccgtttttggctcttccggcgcaagctgtaccacattgtcaccgtttacgcgcttattttcggcttaatcggggctatcgtttttctctggaaagattacatcctcaaatacgactggctttccatcgacaccgtcaccctgaaaagcaacggcattttcaactccgaacaggccttttccgttatgggcatagggccgcaggacaacattttttccatagacgccgcggagctggagcagcgcctgaaaaaatgtcccgccatccgccgggcttccgtcaaacgccagatatcctccaaccccacgctgctggtggacattgacgcgcgcatccccgtggcctggattgactgcccggaactgggaattcacccgggagatgccacgtacggcgctttggcagacaaggaaggcgtcatcttcccctgcatggagcaggtccacatgccttatatccgggaaaagcgcatgccctccgtcacgctcaggccgcccagttccggcaaactcagctacggcgtcagcattcgggaactggaagcgcccatgaaactgattgaactgctttccggcacggtaacggaataccttcccagcatcgtctccataacgacgcccaacgactggtctttctgtgtgcgttttaccaatgactgccaggctactttcagccattacggcctggaacaccaggtggaaaaactgtcccgcgccctccggcatgcacgccagacgcaccgcaaaatcagttccatcaacctgattccggagcacaacattcccgtcatctttgacgattcctacgaggatattcctcttgcggagccgattgaagaataacgccgcccagacgttctccggaaaaaccgtgttcttctccggctccaaacttcttttccggttccgtcccccctgtttcccctaatttcccgccgaacggaacacccggttttcacaagattcttcccatgtcagaattctgttctttctcaatggggaatgagtctgcgaagacccacagaacacttgccaataaggctgtcccggttatactgcgctacgatatatgagcaacgaaacacctttatcccccgaagcggaaaaactggcggcagcccgcaagcgcaaccttgacctggccctctcccaaatccagaaagacttcggagaaaacgccattatgcgccttggagacaacgtcaaaatggaagtggacgtcattcccacgggcaaccttctgattgaccgcgctctgggtgtgggcggctttgcccgcggccgcattgtggaaatctacggaccggaatcctccggtaaaaccaccctgaccctgacggccatcgcccaggcccagaaatccggaggcctggctgcattcattgacgtggaacacgcactggacccacagtatgccgcccgcctgggcgtgaacctggacgacctgctggtttcccagccaagttccggtgaagaagccctgcaaatctgcgaggctcttgtccgctccaatgccattgacgtcatcgtggtggactccgtggccgcactggtcaccaagcaggagctggaaggagaaatcggggattccacggtaggagcccaggcccgtttgatgtccgccgccctccgcaagctcaccagcttcatttccaaggcccgtaccgtctgcatcttcaccaaccagatccgtgaaaaaatcggcgtcatgttcggcaatccggaaactacccccggcggccgcgccctgaaattttacgcctccgtacgtgtggacatccgccgcatcggccagatcaagggcagcgacggcgtcatagccgggaaccgtaccaaaatcaaggtagtcaaaaacaaagtggcccctcccttcacggaatgcgaattcgacatcatgtacaatgaaggcatctcctccgtaggcagcctgctggacctggcaacggaatatgacatcattcagaagcgcggctcctggatcagctataacggcagccagatcgcccagggccgcgacgccgccaaggaagctctcaaatccaacccggagctgtacgcggaaattgaagaacaggtcaaggccaaaatggacgagaagaccgccaaataatcccgcctgttcccgttcctttactgccatttcagggcggctccccttcccgggagccgcttttttctctccggaaacagaagcgcaaaagaatctttcacggaaacttttcccttgtgcgtcatgaaaaatccgttagtctgggtgcgatatcgtcctatgtatccgacctctcgcacaccatttgcagccgtgctcggcattgtgggcatgtttctgctgacgttgtccacggccttcggatggaatccggaaatcattaatggagtgcagtatattccgatgtcagaagtgcgcacccattacaaactgaccagggaacgcacggaagggcggcagaaagtttacgaggtgccggaaaagattcaaatccgtatccaggcgcgcagccaggagatgttcatgaacaacatgaagttcgtgctatcctatcctgtggctgaccatccctccaaggggctgatggtttccaatatggacctgcacaaaatcattgacccggttctgcgccccacttacatcgccaaccgccgcagtttcaacacagtagtcattgatcccggccacggcggccatgacagcggcacgcgcaaccgcatcagcagggaagcggacatcaacctttctgtgggcaaaaagctgcgcgaccgcctcaaggccatgggctaccaggtggtcatgacccgtgacacggataacttcattgcccttcaggaccgcgtccgcattgccaacaggcacaataatgccatcttcatcagcatccacttcaatgacggaggctcttctgcccgcggggtggaaaccttcacgctggcgcccgcgggcacttcctcctccatgtcccgcaatatccgccacgacgccctgcagggcaacgcccaggacagcatgaacattgccctggctacagctgtccaggggcacatgctgaaaggaccgcttgccatcaaggagggcatttccatggttgaccgcggcatcaagcgcgcgcgctattccgtgctgtgcaccatcaagcatcccgccattctggtggaaggcgggttcatgtccaacccgcaggaggccctgctcatcgccacggagcgttatcagaatttcatggcctcttccctggccgccgccgtgcaccagtaccgcaccgccctgggccggcaagtgcgcagaacgcgctgagttccctaactgtcccggggcctcccttcagcagcatgaacatcatccgcattcccggcctggcagattatcaggaaaccttgaggctccaggaacaactggtccgggcccatcaggaagacccggacagggaaaacgaactgttgctgctggaacatgccggggtttataccatcgggcgtacacggaaccacgccagcctgcaccccggttccgtgcttccctttcccgttcatgaaatcaaccgcggcggccaggccacctaccacggccccggccagctggtcggataccccattacggacctgaaccgctgcggcagggatctgcaccgttacgtcaccaccctggaaaacaccctgattgaaacctgtgcccggttcggcgtgcaggcccgcatccgggaagggctggtaggggtctgggtagaaaaccgtaaaatagcctccatcggcgtcggggtgaaaaagtggatcgccatgcacggcttcgccctcaatataacccggaaatccctgcctcccttccttgctattaccccctgcggcatccagggcgtgcaaatgacctgcctggaggatgaaatgtcctccctcctgccggaaggaaacctgttgaaatgtttcggagacgtttttgcagcactatgggaagaaaaatttaaccggtcttaagaggattcggaacgtgcggagggcatgaaaaccatcctttccttgaaggcggaaaggccccaaaggctggaaagaggcccattcagaccatgaatgcagaggaaatgttcaaaaaaacgccttatgtaagacacagaccgtgtcagcaatacgtccttgcatcttgacgcggttcccgaacggacggatgcttatgtcagttatggggaaaacgcttttccaaaaaatctgggacgctcataccgtcggcatcctgccggatgggagaacgcaaatgttcatcgctacgcacctgctgcatgaagtcacctctccgcaggctttcggaatggtccgggacctgggcctgaccgtgcgccacccggaacgcacctttgccactgtggaccacatcattcccacagacaaccaggcggaaccgttcgcggacgccacggctgacgccatgatcagggaactgcgccggaactgcgctgaaaacggcatccgctttttcgacctccccaccgggctccagggcatcgtgcatatggtagggccagaactcggcatcactcagccgggcatgactatcgtatgcggagactcccatacggccacccacggagccttcggctccattgccatgggcatcggcaccacgcaggtgcgcgatgtgctggctacgcagaccctggccctcagcccgctcaaggtgcgccgcatcaatgtgaacggaaagctggcccccggcgtgcgcgccaaggatgtggccctgcacatcatcggccttctgggagccaagggcggcctgggcttcgcctacgaatacggaggcgaggtcattgacgccatgagcatggacgaacgcatgaccctctgcaacatgtccattgaaggcgcggcgcgctgcggttacgtgaaccctgaccggaccacggtggaatacatcaaaggacgcctgttcgcccccaccggcgcggactgggacaaggccgtggaacgctggctgggatttgcttccgacgcagatgcggaatatgatgaaatcgtggaaattgacggagcttccattgaacctacattgacatggggcatttctccggaccagaatacgggcatcagcggcagcacgcccaacccatccgacgcagcgaacgacgatgaacggaagatgatcaatgaagcgctggaatacatgaaattccctgcggacatgcctcttaaggggctgccggttcaagtatgcttcgtaggttcctgcaccaatgggcgcatttcagacttccgggaagtggccgccctcatcaagggtcgccatgtggcccccggtatcagggcgctggccgttcccggctcccagatgactgcccggcagtgtgaagaggaaggcatcgcggacattttccgtgaagccggctttgaatggcgcctggcgggttgctccatgtgcctggccatgaatccggacaagctccagggtgaccagctctgcgccagttcctccaaccggaacttcaaaggccagcagggaagccccaccgggcgcaccctgctgatgagtccggccatggtggccgccgctgctctgaccgggaaagtctccgatgcccgcgaagtgttctccctgaattaactttccaattttttcctttatgtctctgacccaattcacctccatcaccggcacctgcgttcccgttcctggaccggacatggacacggaccgcatcatccctgcccgcttccttaaatgcatcacgtttgacgaactggcgggagtcatgttctgggacgaacgcttcgacgaaaacggacaatccaaatcccacccggtggacgatccctgcttcaaaggggcttccatcattttgggcggctccaacttcggctgcggttcctcccgtgagcatgccccgcagacgatcaggcgctccggcatcaaagccgtcattgcggaatctttcgcggaaatctttttcggcaacagcaccggcatcggtttgccctgcgtgtgcgcgtctgccgccgacattgccgctctggcccggcacatttccgatcacccggaaacggaagtgacgattgacctcctgaacatgacagcttcctggaaggaaggctccttccccatccggatgccggcggaagcccgcgaagccctgacccggggccgctgggattccattgcggaactgcttgtcaacatggatgccgtagaaaagaaaaacaaggaactgccccaggtcgcagcctcctgctgattcagcattcacctctttcctccccttctatcccccttccccatatgattttcagaattacagactacgtccactacggcacgctggacaaccgtgaacgcggaaccgtccgccttacgctgcagctcatggggatgccccatccggtaaatatcaccctgcagggggactgcctccaggatctggccggttgcgtggttgatttcaggaatccctctccccagacccttcccgcggaacttacccagatcccggaacatatccaaggtgtggcgggagacatgacggccagccgccgcatgcctgtcaaaggcaggaaaaccatggaaaacgccctgtacctggaatggttcaccagccaccatgacatggtgctgctggaaagtacggtcttctccatcaaagtctccctccccgaatggattatggattcctgcgaagagcaggcccagatcatggcgaaccagcagatgctgcggacccaggtaaaggaatggtccagggcctattccaaccaccaggaggacggaagcctgcccgaccaccactgggacaaacgcctgcgggaggcggaagccatcgccatcgcctaccaggaggtattccagaaatacaggctgaaccccagcggagacatccgtgtggcctttgtcatgggctgggatgaagtgctggacaacatcgcccagtcggaagaaacggggacgccctgttcctgcaaaagcaccggcatgctcagcctgtttgacattctcaacgaacaggaggcccgggaagtgcagtcctgcatgtttcatcccctcttccagcaggtgatggagctgacggatctgtgccagcaccggttcagccgggaaatcaacaaagcccagaggaacaggacggggccgccggagcccctgaaccagattttttactgcatccgctacatcaccccgcgcattctttcctgcctccttcaggagaaggaagacgcggcggactactgcaccatggccgcccgcatggccctgtgcgtggaacaaacgcgccagacggtagctgcgctggacagccgcggctaccagatggacggcgaaatagcggaacgtttctcatccctgctggaggaagtcaattccttccaggaaagcctggcaacacaaagccgcaaaagcaacctgtaacaacaaaaccttccctggcaacacaatcttcatctttgcgtatgatacattcccacacctgttttcaagggctgtgcgcagtcctggccggtgccgctctttcccacgcggatgagcaggctgtttccatttcggacttcggggtagataaggtcatgtccggccctgtcgtttccatcaatgatcagtacaagggcgtcgtgaaaattgagatggattccctgactccggattacgctactccgtggaataccggccgctaccagggaggcatcggcaccggtttcctgatcggggaaaatgccttcatgacgaacgcccatgtagtcagcaacgcagaacgcatttatatctccatgtacggagattcccgtaaaattcccgccagggtcaaattcatcgcccatgacgcggatcttgctctgctggaggcggacgatcccaggcccttcaaaggaatacggccttttgaattcagcaaaaacctgcctcatctggaagacgaagtaagggtgatcggctaccccatcggcggcaacaggctttccgtcacacgcggcgtggtctcccgcattgatttcaccacgtacgcccacccccgcaacacggaacacctgaccatccaggtggacgccgccattaacccgggcaacagcggtggccccgtcctgatggggaataaagtcatcggcgtggcattccagggcctgaacaacgccaataacacggggtacgtgattccaacccccgtcatccgccactttctggaagacatcaaggacggtgtctatgatggttacgtggacatgggcattcaggctgcgcccatcctgaacccggccatgcgcaaggcgttcggcctgccggacgacgaaaaaggcgtcctgatcggcaaggtgctcaaggggtcctccgccgacggcgtgctccgcaacggggacctgctgatgaaagtggacggctatgatgtggacagttccgccatgattgaactggacggccagaaaatcagtatgaaagaactcattgagcgctgttttaaagacgaccggctcccgctggatatcattcgcgacggcaagcccatgaaggtggaaatggtgatgaagccatccccctccagagaccttctgatggcggaatacgataaaatgccccgctacgtcgtctttggaggcttggtgttccagcccatccagcgcaacgtgctcgcggcggcggacatctccatgctggacgttgcactggacatccggaattaccaggaagacggcggctgcgtggaccatgaagacatggtcatcatcaccaaagtgctggatgatgaggtaaacgcgcgtctgtccggctccatttccaattccattgtggaaaaaatcaacggcgtaaaggttaaaggccttacccacgcctacgaactcctttacccggagaacatgccggaatacgtcgtcatcgaactgaaaaacggagagcgccccctcgtctttgaaggcaaggccatggagacggccaacaagcgtatctccaaaacctacaatatcccgaaaaacgcccgcctggacagcgccattcccggccgccagcctggccgcaacaccactcccgcccgttaaccgccatgaaaattctttccacttttttcctcggttccctgatgttgctcggcggctgccagccgcgcgaagccggacgaaccgctcccgaaccccagcctgaacaacagacggaaacgcctgcggaacagatggaggaaacgcccgcgtcggccccgcttccctcccccaccggctccatggtcggcattaacgccaccaatcagggctatgccatgattcagccgtggagcaaggaaaacccggcgtacagccagggcttcggcatttatctgggagacggcaatatcctgacggcagccaacatcgtttattccgccagcttcgtggaagtgacctccgcggacggctcccagacggttcccgtgaccgtaaccgccttcgacccggaagccaatcttgcccttctgcgcctgaaaaacggaaaagatgccgcttttctggacaaactggtccccgttgcgctggggaaggctccccgcctgggcgacaaggtaaccttctggcaattcaatggcgacggccttcccatcactacctccggaacccttctggcgacggaaagcgcctgcccgttcacgaacggggaaccgttcgtcctgtataacgtcaaatcctccgtcactcccctgaaaggcggcgcaggcaaccccgtcatgaggggcaatgaacttgtgggcctcagcgccagctgcgatccctccgcacagaaagtgctggccgtaacccataccatgatttccaggttcctggaacaggcccgggccggcaattacaccggtttcccggcggacggcacccaggtcacggaactgaccgaccccgtcttccgcaaattcctgggcctgcctgaaactggcggcggcttttacgtggtgaaactgcctgtttacggctccttctacaaagccggagtacgtcccggagacgtggtggaaagcgtcaacggcatccctctggacagcaaaggtttaattaaggatcccgccctgggccccgtttccgccaactttctgttccgagactccgccaaaccgggggataccattacgctgggcatccgccgcaagggaaaggacggctccagccagcccatgacgctggacgtcaaactggacaggagcgcccttgaaggggacctggtcaatccggcccccttcatctccaatccgccctaccgcatttacggaggtctggtatttgtcccgctgacgggagccctgatgggagaaatcaacaagctcagcaagaaccatccccccctcaacctggtggaagccactcaaaagaaagaggacatacggaaaaaaggcgtggatgaaatcgtggtcttcctgatggccctgcccacccaggctacactgggatacgcccagatgagcccctccattgtggaaaaagtcaacggcgtgcaggtgaaaagcttcaagcacctcaaccagcttctggaccttcccgctcccggcggcacgcaccgcatcgaagtgacccagcagccgtacaccatgtacatgtcccggaaggaagctgccaaagcggaccgcttcatccagatgagggccgttcccgtgctccgcagggactaggaatccgcgagccatgttcatttgcagccctcctggcatgtcacttcacacgctgaatatccggcttgattttccctacaggacaggctttacccatggagccttccgcccggaaaacgatgctctggccagcctgatggaacagaggcccggaagccgcgttctcgttctcctggaaaaagggctggaacagttttatccgcagcttccgtcagacattgaccgctattttgaaaaaaatgccggggtactggcctatgcaggctgttgttccgttccgggcggggaggaagccaaaacaggtttttccgcatgggaaacggccctgcgccacattgtggaagcaggcattgaccgccattcctatatcatagccgtgggcggcggagcgtttcttgacgtagcaggctttgccgccgccaccgcccatcgcggcatccggctgttgcgcatcccctccaccaccctctcccaggcagactccggagtaggtgtcaaaaacgggatcaatttcatgggccggaaaaactatctgggcaccttcgccgttgcgtgggccacgcttgacgacttcctgttcctccattcccagcccctccccctgaaaagagccgggctggcggaagtagtgaaagtggcggtggtgaaagacgcctctttcttcaactggctggaaacgaacgcctccgcgctggctgtatgcgaacgggatgctctggaatatgccgtggagcattccgctctgctgcacgcctcgcacattgcatgcggaggagacgcctttgaactgggttccagccgccccctggacttcggacattgggccgcccattacatggaaaccatgtccggctacacactggggcacgcggaggccgtttccgtgggcatgtgcctggacatcctttattccgtccggaaaggatggctgcctgccgcggaggcggaaagaatcatctccgtgctgaaaaccctggaactgcccgtattccaccccctgctttcccgcaggacagaaaacggcgcctgcgaagtgctgaaaggtctggaggccttccgcgaacacctcggcggccacctgacggtactgatgcttaccggaataggccggggaaaagacgtccatgagatagacgccgctctgatggaggaatgcatccgggaaatgcaggaagccgccggatattccgttcaggaataacagccctttccttgctgcctccccgtcagaaaacaggcagaagccatctggcgtatcacagagaaataccagccggacggcagtatgaaaaaaacaacgacgtttttccttcccacaatctccatatccttctgttccggcagtttccgcaaggcggcattattatgtgctgccgggtagcccatgatgcaagccattttgcgactcccccttttttcataacgcgccggatttacttctccttttttaaaaagaagatgaaggaaaaagcatgaacagcctgccggatacctcaaagagaagatcatgccgtcaacaatgcggaggcagtggacacgatgccccgctggaaacaaatccattcatcgtctttgcaaggcacgggaaaaccaaactgccgggagccgcgttccgctgaaaattcagggagggtcttccggaaaaccgtcccttttaaacctgtacggataactccgcgggaaacagaactttcccgtattcgtccaaactgacgccgggccatccccatttacagacgcggtacggcggcgagaagcgcctgcgtgtattcgtgggaaggggaagaaaatactttgtccgcctccccgtattccacaatgcggcctttgcgcatcacggcaatgcggtccgcgatgtaatggaccacggacaaatcatgggaaatgaatatcatggtcaggctcaagtcgcgggccagggcaataagaaggttcagaatctgggactggatggaaacgtccagcgcggaaacgggttcatccgcgataaccagcctgggttccggcgccaatgcgcgcgcaatggcggcgcgctggcgctggcctccggaaaattcatggggatacttgcgcatcagggaggggctcagccctaccttttccatcagttccgccacatcatccctcgtctgggcaaaagttcttttacggcggctctgcaacgcctcctttaatgttgcatataccgtaaaacgggggttcagggaagcataagggtcctggaaaaccatctggaaatccggacgacgcttcctgacttcggatgcggaaagagccgtcaactcttccccttccagaaaaatgcgtccctccgtaggcttctggagcagcatcaccgtgcgggacaacgtggatttgccgcaaccggattcacccaccagccccaggatttctcccttttccacggacagcgacaccccatccaccgccactacgggggcagatttgcgggcagagagcagcccctgcaccgcaggaaagacaacgctcacatgatccagttccagaaaagccatgccgccaccctaacaagccttccgatgcaagacaagaccccagccgcgccagttcctccaatatcaggacatccatgcgcacctcccatgccatttctcccacagaaaaaccagaaccggcaatgaacaccagccccggctgggcatttcgcatgccttccggagccacccggaaccagaagagttcatcatcacacacgaggctgataacagcaaaagaggctgttcccccatttccaccgtccattggcctttttgaagaaccataataccgccaggaaatatcagggaccgcacacaaggaaaaaacatgctccagcccaaaagcgctccaaaaacggctgccaggatgaaggccgcaaccagcagcagggccggagcttttctatcccgcatattttgatgatcccctatccggatttccagatcctccctgaatcaaatttatggataaatccccccatggagccatatcaaacaaaagaaccgttccccgcaaagggaacggttccagagatactctgactcagagcttacgcaccgagctggtagcggacgaaggaggcgacggagatatcgtcgccgagttccttgccggcctggttgaggagggcctccaccgtcatctttccggcagggtccttcacaaatacctggttcagcaggcaggactgggcgtacagagccttcagcttgccgggaagaatcttttccagcaggtgttcgggcttgccttcctgaatgagctgctgcttggcgatttcctgttcctcggccacgaaggcgggatccaggctatcggagctgacgctcttgggagcggcggcggcgatgtgcaaggtcaaatccttggcgagggctttgaacgcatcagacttgacggtttcttccttgccggccttgatggacagcagaacgcccactttgccgcccatgtggatgtaggagaccacggcgccgatgccgtccgccgtcaggcgggcgaatttgcgcagagccatgttttcgccaatggagctgcacatggccttgatatattcttccgtggagccttccgccatggggacctcgagagcctcctccagcgtggaggccttggaatccatgagagcgttggcaacgtcattcaccagaccctggaacttgtcccccttggcgcagaagtccgtttcacagttgagttcaaggatgatgccggagcagccgcagggagccacagcggcacggatcacgccttccttggcgtcacggtcggccttggccgcagccttggcaattcccttctcacgaagatactttacggcggcatccatgtcgccgttacattcgttgagggctttcttgcaatccatcatgccggcgtccgttttgtcacggagggccttgacgagagctgcagtaatttctgccatagtgtttctgttctttctaaatggttggtttaggcttcggcggatgcgcccttgccttcgttgatggccttgacaatgcagtcaagaatcaggcggatggaacggacggcgtcgtcgttgccgggaatcgggaagtcgatttccttcgggtcggcgttggtatcaaccagaacgcagacgggaatgttcaggcggtgggcctcgcggatggcgatgtcttcatggtcggcgccgatggccaccatggcgtccggagcgccgcccatgttgcggatgccctgaaggttgcgttccagcttctggcgttcgcggtccagagcggccagttccttcttggacatgctcttaaattccgggctcttttcaatcccttccagatagacaaggcgttcaatgctcttgcggattgtgctcatgttggtgagcatgccgcccagccagcggtggttgacatagtactgaccagtggcttccgcagcttcgcggacggcttcctgagcctggcgcttgcagccgacgaagaggattttcttattgcggcgggccagatcagccaggaaggagcaggccttgtccaggcatttttccgtttcctcaaggttgatgatatggataccggccttgtccttgagaaggtactttttcatgctggggtgccatttgcgggtctggtggcccaaatgaacaccggcttcaaccatctggttaatcagatcattaatcatatatgtatgtaggtggctttccttgcggcaggaaaagcagtttttggggacttcgacgctttttacccctccgatccccgttgtttagttgcgccgaatcacgcgagggacgggcaatatacttcccgccccctctcttgtcaaagcataaatcattgatttacgaaactattccgccgttcgcggaaccttgtcgcaagcaagctcatggagaactttgccatttcagcaaaatatcttatcgcgcaggcccgtcaaaaccgttcccggcagactctcccatgcccgttttccagtattcccgttccgcttgcaaataaaacgcaccgaacggagggaggatttttaacgttttcccatgccgtgcggccagttccgaagagggcatgtcctcccgcatatgcttcccttttccaatcaggaacggcagcactaccaccttttgcccctttaatccgggtaataccttttccacagaaggaaatgcgccaaagtatgcaagcgccatgtccgttccttccggaagccggaatttcaactgctggaggaattgcgttagctcaggggcagcctcccttcccgttaccccgtgggctaccaccagcagggaagcctccccctccaattccttttgcaaggcggcggccctaaaaccaacaccgccgcatcccgctccccatacgggtttaaaaacaagttccggatgctgcccgctcccggcatacagcgcacgaagcaattccggcaatgtctccgtcaccgtcacgccgctctgcatgaagacagggtaaacccagactacaccatcgcccggaggcaaatccgccgccgtcaggctgcggaaagacccctgccagacacagtcgcttgaatagtgaaactgctccgccacatgctgccgcaattcagcccctgcttcatcataggaaataaagagtttgtaaatcttcctgggcatttcggtaagaccactgcgggggaacggcgttcggaacatcctgtcatttattcatgcggaagtaacgcatgatggccgtttgtaacaaaaagtccggagggcggcaactccatacgctttttttcaatccatgctcccctccatttacacgcacctatctaaaaaatatttaccatatttataacaaaatcattatatcgaatataaaaagatacttccggaaaaataaaccttcgcctccgaatctccgcgcggaggcaggatagcggcttgaccgaaaggcctgaaaccgtcatgatacaaggacatacaggttttgttttatgtcgttttacattcaatccgttgaaatcggcggcccgcggccgttctaccttctgggcccctgctctctggaatgcgaatcctttgtatgggagatggcccgctccatcaaggccatcgcggaaaacctggatgtcccgctgatcttcaaagcttcctacgacaaggcgaaccgcacttccgtcacctcttttcgcggcccaggcgtgcaggaaggctgccgcattctgtcggaaatcggcagggagctgaaactgcccgtcgttacggatgtgcatacggcccaggaagcggaaattgccgccgaatacgtggatctgctccaggttcccgcttttttgtgccgccagacggatcttctggaagcctgcgccaagagcggccggcccgtgaatatcaaaaaagggcagttcctggctccgtgggataccgtgaacatcggggaaaaaatgcgcgccttcggctgtgacgaattcatgatgtgcgaacgcggcaccacctttggttataacaatctggtggtggacatgcgctccctgtactggatgaaacaggaaggctttcccgtcgtattcgacgccactcacgcagttcagaaacccgggggattgggaggaaccacgggaggagacagcgagctggcccccgtgctggcatccgccgccatggcgacgggcagcattgacggcgtgttcatggaggtgcacaaagacccgtccaaagcgctttccgacggccccaaccaaattcctctccacctgcttgaaggagtgctgaaacgccttcagtccatccaccaggcggttcagtcatgatgaaattattgtccacatgctttttgacggccgccctgtacggcacggaggcgcaagcggacaccagcctgcccgcagccacgccttttgccggcgtagataaaaaattacctatgctggagcttctgcccgtaggccaggtgctcccaaaagtcagcctgtcacgatatgaagggccgcgcctttccatgctgctgacggcttcaagcgtgaccgtggccgccccgcaggaaattgccgcgaatatcctgaacgtgtacttgtacggaaaaaacaaccagacctcccaccttttcacgcaggccgcctcttattttctggataaaaaactggccgtctcccatacggaaaccaccctcagggaagagaatctttccgccaaagggaccggcctttacctggacaccaatatcaagaggggcatcattctgggtcccgttcaaaccaccatccgcatggctcaacgcaacaagtaaccattcctttttatgaaaaaactttcctccctgctgctggccctggccggaagccttgcctgcagcggcgccaacggcgttccctcccacattgtccagcccctgcccagggaactggatccccgcctggaacaacccctcaccccgccttcccatattgtacgccccctgacggcggaagagacagcccggagggaacgggaactggcccctgttccgaccgcaggcttgaaggaagacggggaaaaggcgattcaaacatacagcgcgcaggaaaaaaccgtagacgggcggattcaggaattccgccagcagcaccaggttgccggaaatacccccgccccggctgcggaaactactccctcttccgcagcatccggcccggaggaaggcttcctgcaggccaattccccaaaagacctgtacaccgtagattgtgacggagacttgtacttcgatatggaagaaggcgttctggtgttcatgaaaaatgtccgggtgcgcaaccccggcctttccatggattgtgcggatcatctgaaaatttatgcggaattcgtgccgaagaaaccgggcgacaaaaaaccctccgacgtcaagaaggaaaaggggaaagaagaaaatcagactcaggtggctcttcccaacggaggcaatttcgactacaattccattaaaacggttgcggcttccggaaatgtgaaggccagttacaccaacaaacagggagaaacaagcaacgcccaggctgaaaaaatcacctacaacgccaaaaccggagaaatcatcctgacgggtgccccggtcatcgtcactccggacgtcatcgtgaaaaatccgaacaaggatgctttcattcgagtgtactccaacggaaacatgtacggcagccgcggaaccaagactacgttccgccacgtagacaaaaaactttccgaccgggaaaaccagaaaaccagccgcaaaccgtgagttcgttccactcttctcctttgctaagtgccgaaggcatctgcaaaacctacaaaacgcggaccgttgtggaccaggtcagcctgaaggtagggcatggcgaaattgtgggcctgctgggaccgaacggtgccggaaaaaccacttccttttacatggtagcgggtctcgtacgcccggatgaaggccgcgtgatttttgcggacgaagatattacggaattgccgatgaacctgcgagccaggcgcggcatgggttatctgccgcaggaagaatctattttccgcaagctttccgtggaggataatcttctggccattcttcagacccgcaaagacatgacttcccgccagcaaaaggaccgcgccgtagagctaatggaccgcttcggcatcaccaagctgcgccgctccatggccatccagctttctggcggcgaaaagagaaggctgaccatcgcccgcgccctggctaccagccccaaactgctgatgctggacgaaccgttcagcggcgtggatcccatcgccgtttcagacattcagaaaatcgttatggaactgcgcgatacggacggcctttccatcctgattacggaccataatgtgcgggaaaccctccacatcgtggaccgcgcctacattttgtttgaagggaaggtgatcaagcacggtacttccgaggaaatcgccaacgaccccatcgcccgcaagcagtatctgggcgaccagttccgcatgtaactttattttccgtctttcccatgtcctctccgcagaatacgatcgccctggttttcgactacgaccagaccctgagtcccttctacatgcaggatcaggccatcttcccggaattcggcatttctccgcaggaattctggaccaggtgcaacgccaccggagaaagagaaggctgggacggagaactgatttacatgaaaagcctgctggacgccctttccctggaccgcgtcagcaacgcccggcttacccagcttggagagcgcctcaccttttaccccggtttgccggacttttttaacgcgttcccgtccatgaccctctcctcccttcatacggatctgggcatcagcattgaatactatatcatctcctccggtttgaaagccctgattgacggttccgccctgcgcccttatttcaaggccgtattcggatgcgaattcagcgaggagaacggctacatcaattttcccaagagagtcatttcccacaccacgaaaacccagtaccttttccgcatcaacaagggaatgctggattacgaccaggacgtaaacgaccacatgccggaagacatgcgccccattcctttcgccaacatgatttacatcggcgacggccctacggacgttccctgcttcaccgtcatgcgccggaacggaggccacgccgtagccgtatataatccggaagatgaaaccggccgcagtttccgcaaatgctataatctggcctccaattccgaccgcgtgaatttcatcgccccggcggattacacgcccggcagccatctcacccgcctgctgtccggcatggtcacggatatcgccaacggcattgtgcgccgccgggaccgggctctggcggattcctgtattgcggctccttccttttccaaataaaacccgctccattcctctccccgtcatgaacagccatttccactttctcggcatctgcggcaccgccatgggcgcggtagccgccgccatggcccgccgcggctttaccgtcaccggttccgacgccaacgtctatccccccatgtccacttttctggaggaggaaggcatcacgctgtttgaaggctacaaggcctccaacatcccgccggatgcggacgtcatcgtcatcggcaatgccatgagccgcggcaatgaggaagtggaagccgtgctccaacggcgcctgcgttacctttccctcccggagacgatgaaggaatacttcctgcgcggcaagcgcaactatgtggtaacaggcacccacggaaaaaccaccaccacatccatgctggcgtggctgatggaggattccgggctgaaccccagtttcatgattggcggcattgcccgcaatctcggacgcgggggccgttttacggattccgatttttccgtgctggagggggacgagtacgacacggcgtttttcgacaagcgttccaaattcctgcactacctcccggaactggtggtcatcaacaacattgaatttgatcacgcggatatttacaattccctggaggaaatcaaactgagcttccgtcggctgacccagatcatcccccgcaacggcctggccctggtcaacgcggacgatcccaactgcctggacgtggttaagggggccccgtgccccgtcaagacggtgggcttttccgactcttccaacatccgcatcctggatgtggagacctccacggacggcagccatttcacactggaaggaacccggtactacgtaccgatgattggagagttcaacatccgcaacgccgccatggcaattgcagccgcacaatttgcgggactgaacgtcaagcagctggcggattccatgagccgctttgaaggcgtggcccgccgccaggaagtcaagggggtggtcaacggcatttccgtagtggacgacttcgcccaccacccaacagccatcaaacaggccatcctgggcctgcgccagcgctatccggaatcacgcatctgggccattttcgaaccgcgctccaacaccacacgcagaaatatcttccagaatgaactggcgttgtccctcgctacggcggatttccctgtggtagccgccgtggatcatccggacaaggtggctctggaggaacgcctggacctcaccaaactttccaacgacctttccgcgctgggcaaggacgctctgattggcggccatgcccaggaaatcgtctctgccgtctgcaagaaagcccagccgggagacgttattctggtaatgagcaacggcggttttgaaggcattcacgccaaattgctggaagcactgaacgcctgacccttcttcatacatccacttccaatgaaaaacgcatccaccatcaccgccttcatcatcagcttcctggtcgtaggcagcctggccctggttttcctgttccttgacaataaggaagaggaacccgccgccgctgaaccggcggcgcaaacggaagtgcaagcacgccagacggtaacgccccaacccaccgtcgacccgcttaccaaggaagatatcagtaagcagacggctacgccgccctccctgatcaatctcagctccccccagacactggcgcaggcaattgccaaagtcattcaggaccgggatgaggacatcctgaaatccctggaaatccagcaggccgtgacggagaaccagagtcgcctcatccgggagctcatggaagcccgccatatacgcctttcctctcccggcatcaccagcatcggcgcgaacaaccagggggccaatcccacagccagatacacgctcaatttcagcagcggcgcgcgcggctacctggatatgaagcgcaatgacaagcaacagtggacgctggataccctcactctgcccagcaagcaggatctggccaaggacaaagtcgcccccatggcgatgaatgaccccatgggcatcgtcagttccttcatggatgccgtcgccaaggcggatttccgcggggcgaggaagttcgtggacggaactaaagtgcaggatgccacggtagccggtttgtgcattctgtttgaggagggggctttccggctccgggaggacgctcccatcaaaaccgcctacgaagcgcccaccaatgcggggtttttcgttcatcttcaggacgcccagggcaggaaggccggcaatgtaggcctgaccgtggccaaaacggacggacaatggctggttgcggaagcttccctggacagcatgctggaagcctatacgaaacggcagggggccggagacgacatctttatccccattgtaaaaaatccccagggcggcgattccctggccctgttcttcggctttaatgaagataccctttccaagcgttccgaacgccagctgcaaatcgtagcggaagctatcaagatggacagtggcaagaagctggaaatcagcggccatacggatgacgtggggagcgaacgctacaaccaggggctctccgaacgccgtgcggccgccgtgaaagcccagctcgtccagttcggcgttcctgcggaaagaatcgttaccaagggattcggcaaatctcagccgcgccgaacctactcccccacggcagacgaagaaacaagggatgaagcccgcaaggaaaaccgccgcgcggaaatgtacctggacttttaaaagagtcatcagagagcagagaaggggcaagcctttccaacttctctatttactgttgcctgtcaattattaaccatattccatggctcgccgatatgtcatcaggcaggatgccgctccggtcgcccccatctccgggatcgactaccgtacggccctcaatgaagaacagtacgccgccgtttcttcagaaccggggccggctcttgtcatcgcaggagccggatcgggaaaaacgcgcacgctgacttatcgcgtggcctggcttctggatcacggtacggacccatggaacattctgctgcttaccttcaccaataaggcggcgcgggaaatgacggaacgggtgcgttccctgattcccctggacttgtcccgcctgtggagcggcacgttccattccattgccaaccgcatcctgcgccagcatgcggaatacctgggatatacaccgacttttacaatcatggactccgacgaccgcaaatccatgattaaaagcgtggtcaaatccctcaaactggatgagaaatccacccgcttccccaagccggaagttctttcatccctgttcagtctggcagacaacgagggagccaatatccgggaaacgcaggaaaacgcctatccctacctttccaaccacctggacgccatcctggaggtgcatgaccaatacgtagcccgcaagcaggaaaccaacagtatggactttgacgacctgcttctcaacgtcgtgaggctttttcaggaacaggagcacctgcgtgccctgtacggttcccgcttccagcacattctggtggatgagtaccaggacaccaattacctccagagccgcctcatcgacatgctggcccgggaacacggccagctgatggtggtgggggacgatgcccagagcatctactcctggcgcggagcggacatggaaaacatcctcagcttcactacccgctatccggcggcaaagactttcaagatagaaaccaattaccgcagtgtgccggaaattctggaactttccaacgcggctatcgccgccaacgaagttcaaattgaaaaacagctccgctccgtgcggcccaccggggaaatgcctcccgccctcgtcccgctcaacgacgaccggatgcaggccaaatttgtcgtccagcgtatcagggatctcattgaagaaggcacggaccccagtgaaatagccgtgctttaccgcgcccacttccacagcatggaattgcaaatggaactgacccgcggagaaatacctttccgcatcaccagcggcatcaggtttttcgagcaggcccatattaaggacgtggtggcatttatgcgttttgtggtcaatcccagggatgaactttccttccgccgcatggtgatgctgctgcccggcatcggccccggcatggcccaaaaactctggatacgctggaccgcctgcccggaaagcaggcaagaaacccctccggaatccttttccgccctgatgctggatttcccggttcctgccaaatccagaacggcttggacgcagctttgctacacactggatgaactggcccctgccggaaagctggccggaccggcctccatgctcctttccatcaatgaggccgtgtacgacgagtacatgcaggccgcattcgaaaattacgaccagcgcaggcaggaccttctgcatctggccggattttccgaacgctttgaatccacggaggattttctttcccagctttcccttttgggcaacacggatgatgaaagcgccgcggcggacttttccggtggctccgtcaccctgtccactatccaccaggccaagggactggaatggtctgtcgtcttcctgatcggcctgtgcgacggcatgtttccgcaccagcgggtcattgatgacggagacctggccgggctggaagaagaacgccgcctcttttatgtaggcattacccgcgccaaggaccagctttacctgacctacccccgctggaactgccgcgcccagggaggaaccttcatgcaaatgccctcccgctttctggatgaattcccagccggcctggtggaagagtgggaggtggaataatccagatctcctctcccgggtcatatccgggaaacgccggttctcaatcttctcccgccggacagggaaaacgtggcgcggagtttccgaagggttcttttcccacccgtttgaattcctgcttccaacccttatccggagatatttccgtctttcccggagaacggaattccccgacaaccccggccatattccaaaaaccgtgacaccgcggctcttaccgcatccttccgtttctaccgctgcggttcatcaccgccatatccagcaaagccaatacccacttccgtattttgcttctcaaaacgcttgttgggaagcatcccaaaccctcttttcattcctgctggtttgcaaaattaaatatatagctttctgattttggcgggaaagcgcttagggaaatatttcatatgcgtttttgtaagtaagtatttacggaatatactgaaatccccacttcgtcatttcatagaatacaggcaacaatgcctgccccttttccgtaagagagtattcaacacggggcggtatctcgttgaattgcattctggatacaagcccgtccttttctaattctcgaagggaagaggcaagcacggtatttgtaataccattaatatttttttttaactcaccaaagcggatgggatcttgaataaacaattcataaaggatttgaaatttccatttcccctgcaacataagcagaagtggagtcacaggacaattccccgcttcagtcaaaattccctctttcacttcatgcctgtattcatcgtaggtcatatccttgtgcatgaaaaatgccttcctttctctattagtatagtcaaccgtactgagtcagaataatatacgtacttgaaaaaaattttatccttagtataattatcttactaatagaagtcaacaagtaaagttaaatatttataatcgttttacaatgaaagaaatcaatataggtcaggcgacggctatcacctctcccaatcctctcgtgttggtttgcaccaaaaaagagaacggtatgctgaacatggctcccgtttcattcttcatgtactcctcgtttaaccctcctatgctggcctttgcaatgggtaaaaccgccaattccggcgaaaatatccgcaagaccggcaaagccgtactcgctgcccctggcgtcagcttgaaagatgcggtcatggcttacggctctaaaaacggcgggcagattgacaaactgaaggaatttccagtcgctctgcaaaacattgacggaacagacattcagatcccggaggacagccctattgcttttgtggcatcgctagctgaaactgtggagtctggcgatcattacctgtatctctgcaatattgacaaaatagtggcggacaaaacaaaagaagccctgttcgcatggaatggttatgccaaagttgccccggcacaggaaaaataatttgatgccgtcagcggggttttcatggttttctgtgaaagccctgttcttttccaaatatcaaaatctggcgatggggatgatataataaagtgtataattaaaaaaaagcgacacttatgagccagttttctaattttcaaagtagaccggatcacattgaaatccgtggtgcccgtgttcataatctgaaaaatattgatttagatatcccgttgggcaagctggtaggaattacgggggtgtcaggatcaggaaagtcctctttggctttgggcgtactttatgccgaaggttcccgccgctatttagaggcattgtccgcctatactcggcggcgtataatacagatggcagaggcaaaaattgacagtatagaatatgtcccggctgcccttgctcttcgtcaacgtcccgctgttcccggtgtccgcagtacatttggaacggctaccgaacttttgaactcaatccggcttatgttttcccgcttgggaaatcaccgctgtcccaatggacatttgctttcgccatcggtcaacgtcgcggcaatgcgtccccttgtctgctctgtatgcggagcggtatttgacggtctcagcgcagaaagtttttcattcaatggccaaggagcgtgtcacacctgcggaggaactggaattgttcaagcagtagacgaaacaactttagtgcctgacgagtccctttccattgacgaaggagcagttgcgccgtggaattttttgatgtggtcgctgatgactaacgtatgccgggcgatgggcgttcgaaccgatgtacctttttcggagttgacagaacaggaacgggagatcgtctttcatggtccgccagaaaagaaacatatcctttataaagcaaagagcagcaatcaagcgggagaaatggattttacctattataacgctgtttataccgtggaaaatgcccttgctaaagttaaagacgaaaagggaatgaagcgggtagaaaaatttttgaagcggaacacctgcccgaattgcggaggctcccggctcaataagcgggcgttatcaagtctgctatgcggaaaaaaccttgcggaaatcaccaaaatgacattaagcgatttaaccgcttggataaagacgatttctgcttccatgccggaagaactaaaaacaatggcggaaagtatctgcggtcaatttctgcatgtatcaaaacgtctttctgacttaggtctggattatattacccttgaccgggccggaacaacgctttccaccggagagcgtcaacgcgtgcagcttgcaagggctgtacgaaaccgtaccacaggtgttctctatgtgttggatgaaccgtctattggcttacacccagcaaatgtagatgggctgttgggcgttatagatgatcttattgcccatggtaattctgtgatattggtagaccatgatgtgcgagttttaaaggctgctgattggttaattgaaatgggcccaaaagctggagagcatggcggacagatagttgcacagggaacgattaaagcagtagcaaaaaaaacgagttcactcatcgctggatttttggcagacaaggaaaaaccggttatccgagaaacggcaacgccggaggccatgtttgcacatgggcatatcaaactgtctactgctcctttgcatacagtccatgcccttgatttagacatccccaaaggtcggctgattgctgtaacaggagtttccggttccggcaaaacaacactgattttggaaagtcttattcccgccatagaagctgccatagcgaaagcgccgatgcctgaccatgtgaaaagcgtggaggtagccggtattgaacgtataaatcttattgatgcaacacctattggcgtgaatggccgttctaccgttgcaacatacagcgggatattagatgatttgcgccggctttatgcagctgtcccggaagcaaaatcaaaagggtataaagtaagtgacttttcctataatactgggtcactccgttgctttggttgtgacggaacaggtcaaattacaatggatgtgcaatttctcccggacgtggatatcatctgcccggactgcggcggctcccgctatgggaaagaagcggaggcaattcgttatcgctctaaaaaagacaaggtgaacgcacccggtatttctctgcctgtactgatggggatgaccgtggagcaggcgttagaacgcttatgtgacgtgaaaaaggttaaagaaaagctccaaattctttctgatttaggtttggattatttaactttaggcgaagcaactcctgccctgtccggcggtgaggcacagcggctaaagctggcggctgaaatggaaaaggcacaggacgacgccatatttgtatttgacgagccaacgattggacttcatccgctggatgtacggatactaattggcgtatttcagaaacttgttgatgccggtgcaacagttatcgtcattgagcatgatttaaacatgattgccaattccgattatgtggtcgatatggggccgggaggcggcaaagcaggaggacaaattgtagcaactggtttgcctaaaaaaatcgctgaaacggctgaaagccttacaggaaaatatctatgtgaaataatttcataaaaacgtaaatctgtgggacgacggtaaaagaaaaagccgtcgtgcaacagcattttgatactcccaaattaaaaaacggcggtctcgggattctcaaagccgccgttttctatcctctctctgaatgtctgaccttcacggttctgcgtatatcaaggctcttttcgtaaaattagcaattaacttctccatatccgcgaaaataactgttttcaagaatttttagagataatcaaaattgttgctataaaaaatgaattgacctggatgttcttgaaattccttcccggctcaaaactgaaaaaacatgtcatgattaaattatttgaagaagaaatataaccaattcatcatgaacaattttaattattattttcattaatttctctcatgtcattccggtgaacgaaccggaatgagaatcatctaaaatctcgggcgccgtgattgtcacgaacgcataaccatctaatcattaaacaaataaaaaagcatgaaattaagactcccacatatgctgctggcggctgttatcgcctgccttggcagtttctccgttgctacggcagctgactatgcagtcaacagtgccgatgaattcgttacggcctggaaccaggctgccgcttccaatgaagcttcaaccatcacgattaccgtaccttccggctccgataatattacgctgacccaagagcaacgagcccagttgaacgccatctccggaacgggcaacgtcaccattcaaatgacggacgccagcaacaaactggttaatttcaattacgatctggttaacaaccaagtcagtttcaacgacgtcaccttgagtgaacctctgggaagcgacaatgacattgtggtgacgaatgcttcaaataccacaactattgatggcaggaatattgccatcgaaggtacgaatgatgctgccaatcccaagacggtgggagccaccgtcacctccacgaacggacaggtaggcatcggcgacaatgtttccatggaaaaagccgttaccgtcaccggccaggcagctcaaaccgtagatccggcaacgccgccgaccggccaagcctataccaagacgacgtacaatacttacaataattccaacgaacaggccgtggtcctgggcaacaacgtcacgatgcaggataccgtaacggcgacaggccaaatcgtaagcgatccggcatccaaggttgcgctgaacggagatgtgacctccacagcgggaatcggaaccgtaactacggaacagtttgacgcctccaacgcccagaccggcaaaaccgtcatcgactctatggatgacagcgtctccggcggcatcattcttggagaaaccacagccggggccgtcaccctcaaaactgagggcggcaatatttccctgggagacaattccgtcctggatggcactactgtttccgcagaatccgccgacctgaacaaaaccgtttacagcaatgacggcggcagctggaataccgtcgcaagtacggaaaagctgggcaccatcgaaggcagcgtcacgctgggtgaaaatactaccgtcaagggaaattccaccctgacagcggatgacaatatcgccatcggcaacaacagcgtcatcaccggcaataccgccgctgacggcgtgatctccgcaggtggccagatttccatcggggacggtacccaggtcttggataacaccgccaccagcgacggcaaagccgccatcaacctggcggacgggcaaaccctgtacatcggctccggagcaatcctttccggcaatacttccaacggcgtttccggttccgtgcaggctggccaaaacacccagatcaacgtttatacggacgccaccgcctataccttcatcaatgacggcatctccaccacggccgccgcttccacggctgacgccgctccgctggctgctgaccagaccgtcatgacgaagaccggagcgggaactctcgtttacggcggcacaggaaccaccgatacgttcggaggaacctaccagcagcttgaaggcaacctgatcatcggccatgccaccttcggcgccgttgactccgccaccggaaaagtcggtccgctccagtccattgacggcgccgtaatggggacggacgatactgtttacgacattcggacgggacaggtgaccctggcgaagaattccaccatgaagggagcttctgccactttcggaggcgattctaccttgctgctgagcgacgggtccgtactggacttcggcactcccgccacgttccaggataattcccgcgtaggcatccaggtatccgacgccagcggcaatcccgttccgctcgcccaactccgcaagggaatggaaagcgtgacggtcacgctgaacggcacggacatttccggacgcctgctgaacaacgtatttctgagcaccaccatggctccgggaacggcggaaggcaccaccaccatcacccaggatatgaagggcattgacggccccatgtccggctacaacggcaacgtttacaccgtagcggccgctctggaaaacaaccgtctgaatgtggccgccggttctcccgccgcccagttctatgaaaacctgttccgggccacgagtgcggatgaagcggcccgcatcatccagtccgtcagcggtgaacacgtggtgaacttcacctgggcagccagccgcaccgtgcggaacttcgccgacctggggcgcattcaatccgccgcctccatggcacgccagacggaagacaccgttgaagtagtggacgccaagggttctccgatcgcccgcaagacaatcgccagaggcaacggcaatatctgggtgggcggcatgggaatctgggatgaccaggatgcccgcgacggtgtttccgggtataagtataatgccggcggttatgccgtaggcattgactacaaagccgctcaaggttccctgatcggcatcgccgccggtcaaagcttcggcagcttcaaggataagacaggcatcggcgccgactacgacgtcgattccttcctggccatgatttatggacgcatgcatcccttcagggacagcaagttcactctggacggctacggcgcctacggacgttcccgtttcaaaggtgattcctacatcatggggtccgccgccaacggcagagcagatacggacaccttcagcggcgccctttacggcacctggacggaacgtttcgcactcggcagggcctttataacaccttacacgggtattgagttcatgacttccgaactcaagggattctctgaaagcggaccttatgggcgcaccttcggccacgcccgggcccagaactggaccattcctgtcggcattacgatcgcccgcgcctaccagacggacggaggcaccaccatcaccccggccttgacggtagccgtatcccaggatgtgagccgcatgaatccgaaatccaatgtcgccggccccctcggaacctggaacgcccgcggcgtcaatgttggccgcaccgcattccgtttgaatgccggcattgatgtgctcttctccaaccagtggggagcacgcgtctgctaccagttcgagacccgcaacaagctgaccgcccacggtatcaacggcgccctcagctatacgttctaagtaggagagcgctccagcgcatgcttttacttggttatggtaggccctttcccgccccacgcgggaaagggttttccgtatgtttccgcatccgttcttttaattcctctgcggattcccaatccgaaaaataaatccacgtctctttattatgcataaataattggaattgtgaattatataatggttttaaatttcccgcaggaaagtttctgtttataagacgactctgttcatgtatttgtataaacatctcgtttttatcgtttagtgttgacttcggattgggaatccgttacccgtgcttttttgaagtacctgatcaacatgaaattatctacattctgcatcttatgttgcctttccgcaggtctttcccaggctgccacctacgtctggagcggagcggcagggaacggaatttacggagattccaacaactggacggtcaacggcgcgccgaacggctattatccgcaaagcaatagtgataccgccatcatcggagaaaatgccggaacgatcacctggtccaccgggcaatcttatttcggagccactaacacagtccaaatagactccggaagcaccctgctttgtacaacggaaataggagatctcaacgttaattctttcacgctgaaaggcaattcccaattgatatttgaatccagcaacgcccttggactgggacgtgatttcacgctgaacttcggcacgtttacggcggaggaacacggttcctgggttgccacgaatctccccagcttctggaccaatgggaaaaccgtcaccttcgtcggcacactggatatgaacaacctttccggaagcggaactattgaactcgcttccattaaattttcccaactgggaggcgatctcaatttggacctgagcggcctggacattaccggcaacaaccaaattcaagcggatgtaacacaggtcacggaaaacgacatcatcaaggtgttgattaactacgaaaccgttccggaacccgcaacggccacgctgagcctcctgggactgggcggtctgctgttaagaagaaagagacagtagcctcttccgcatgtctgattccaccccggcttattcctcaaggaaagccggggttttcttttgccgctggcccggtttgcgcacgcctcccttataccgcaacatttaccctgcggaaccatatagcatccttccagacggaaaaatccgttttccggagcaggtcagaaatcgcaattccgcggggtacgggcaaaaggcaggacgtcgcggatgttggtcaccccggtcacgaacatcaacaggcgttcaaacccggccccgaatccggcgtgcggcaccgtgccgtagcggcgcagatccgcataccaccggtacgcttccgcattcatgcccatgctgcgcatgttttcctccagaatatccagccgctcctcacgctggctgccacccacgatctcaccgatgccgggcaccagcacatccatggcggtaacggtctttccgtcttcattcaggcgcatgtagaagggtttaatctccttcgggtagttgtacacgatgacgggacatttaaaatgctcctctgtcaggaagcgttcatgttcgctctgcagattgatgccccaggaaacggggtaatcaaatgttttgccgctcttgagcaggatatccacggcttccgtataggaacagcgcacaaacggcgtttccttcacatgctccaggcgttcccgcagccccttgtctacaaaacgggtcaggaattccacttcttccgcgctgtttgccaaggcatcgccgacgagaaaacggacaaactcttccgccatgtccatgtctccatacaggtcgcagaatgccatttcaggctccaccatccagaattccgccgcatggcgcgtagtattggagttctccgcccggaacgtggggccaaaggtataaatgttgcttagggcgcacgcgaacgcttccccttccagctggccgcttaccgtgaggtaggccgccttgccgaagaaatcccgggaggcgtcacgggaagcagcgtctcccacatccaaagtcgtcacgcggaacatttctccggccccttcgcagtcactggcggtaataatgggagtgctgacccaggaaaaatccctttcctggaaaaagcggtggatggcgaaggccagcctgctgcgcatacggaacacggctccaaacaggttggtgcgggggcgcaaatgggcgatggaacgcagaaactccggcgtatgcccctttttctgcaagggataggaatccggaacagcccccaccaactccagggaagcggcgcgcaattcccatcgctgccttccctgcccggcaaccagagcgccgcggatgctcacggcagaccccgtagccatttctccaatccgttcatagccggggataccctcatccgccacgacctgcagggaggcgacggaggaaccgtcattcacctccagaaaggaaaaagccttggaatcacggcgcgtacgcacccatccctgaatcagtacgtccagcatttcctcctcactgtccaggacatgtttcaccaatgttctgttcatcatggcgcaagtataatacagcgccttgcccatgccagcagaattgcttcaccacggagagaatattccggattttccggcagagaaggaggggatatgccgcacctgttatttggaaggctgcatgacctgccgccccgtcgtaatggcgatggcatccgccagcggcatttccttctccgtatgggcggccccccaagaatctgaaaagataagcgttttcttttcctcgtcaaaaccggtaatcagcctcaaatggcctccgcgcgtctgggacaaacgcaacggttccggaacaatgccaagctgcacggaccagaacacgggtatgcccgccatgatatagggcctgatggcattgagccacctgtccacctgggacggtgatccggcacgcgccagcttcaggacttctccgtccgcattgtcccagaaaccggaccagtcatgttcattttccaccttctcttttttcagcttggaggcggcgcggttataggctttcagcagattcctgaaatcacgggaattcgccagggaatccagcactttgatccgtatctggaagcgcgtcccgatttttttcaggttttccgccattgccgccgtattagtgcctccgtccgcagaggtattggccagggaagccagttcatgctgatccacatagtccattccataataggcaaaaatgcgggcggcggtagccaccacgcaataacctttctggccctggtccaccatgggaatatcctgaatcaccacccgctttccttctttcctgacgtgctgcttgatatccgcctttctggcccgggaagaagcatctcccctcgcgatggaatcttccgtgggaccggccttcatccggataaattccgcttcaaactccctgccctccctcgatgtgttgatctccaaggtaatcgccccgttgtcccaaatccaggaccagccgttgactttgactaccgcctccttacgggaggcccggtactccttgggctgaatcccggtaagagcggtcagggattccttgatgagctccaggcgcttgtcaaattcatccttgccaatggccccgttatcccccttgttgtacatcatgacagtcattgactggggggctccgtccttccagttcaccagcatttcccccagggacatgtcccctatcttgatggagggcttcgcaatccggagctgggtcttgcctttatccacccagccgccgggctctccgttaaaatactttccgaacaaatccggctgaggcagcttccagaacgcaccagactttaaatccggcgccatgttgcccgcgccccaagcggagggaagaaggcagcagactgaaaggaaaggcagaatggcagagataaatcgcataacgaaaaaaggggcggggaatagccccgctgctcggaatctacgctggtaatgtattctcccatgacggttctgccaagaaaaaatgaatcttcctccagcgaaccattccttctttatcctctcccatccgtccttttctaataatgctgcccggtaaaaaaaccggcctgccgcagtaaattccgcagcaggccggtttgaatgaataaaccagtccgatgatttacatgaacggacgcaaacgctgcatgatagcgtccttggaagaagctcccaccatcgtatccatgatttccccgtccttgataatcagaagagtggggatagtgcgcacaccataggtagcggccagtccgttattggcgtccacatccactttgcccactttgatcttaccggccaattccgtagaaagctggtcaataatcggggcgatcatgcggcagggcccgcaccatgtagcccagaaatcgacaagcacaggaatgtcggacttcagaacttcatcctcaaaatttgcttcagaaaatacgtttgccatagtaccgcttagagtatttcaacaatcattacgttcacttattcttccgcatcggcgccatcatcggaagactcttcggcagaaacgtcatcggccgtttcttcatcggcggcgggagcagcgggggcaggcttggagtctccgcccagccagccaaccatgctgcgggcttccaaggtgtccgtagcgtattgataaccgatgaaaataagcgcaaaggcaagggccacaaaggagagaacattcaacagcgtactgggagccgcatccgtatcttcttgaaacttcctggccgtaaaggaggcggaagaaaccggagaggccgcgggtgcggtattcagcccgatggtggcctgcggaagctgtgctgtcgccatgcctgctccgggaggagtcagaggaacagtaggagcggcagcggcaggcgccgcgccagcaggaggaaccacgggggccacaggcgtagtggcggagccgagggcaaccgtctttaatcctccgccaagcttgatgcctccgccaagaccggcgggacgaaggggaatagtgggcgcagcggcggcaggcggagcagcaggtgccgcaggcgcggcggctactggaggaacggccggagcggcaggtgccttgggcacggaaggagcagccggcggagtcggaatgctgggcggaggcggagtaccgcccggaatggaggggggaggtggattactcatatcggaaaaataactgtgctgaacgatagctctcgcttatttcagcccgtaaatcaagaaaaagaatgcgtagaacctgaattccgtgcaattttttttaatttgaagcgtattccatctcaaacacgctgtccggacttgccctgaaaagcgttctttcctacgctgtgtatccggcattatctcatatgaaacccattaccaaactagcttcctccactctgcccgacggctccgttctcgacctatgggaacgggacggtttccactttcttttgcgcgacggcgtacagacagcgtccagcttttcccacggaagcaatgaagcagcggcagccatggcggcggctccgattaaaagagccaaccagccctccttccttctcgacggcctcggcctgggattcaccctgttcgccctgatggatcaaattcgcagggaaaaggcccgcttcatcgtggcggaaccctgcaaaccgcttatcgactggcacaaggaactgatgaaccaggaacggcccggattcctgcacgatccccgcgtcagcgtggaatttaccccggcgcttcaaatcgcccgcaagaatccgaaaagcttccacgccattctgtcccattccacgcacgaacgcatgaacctgagcgtagccgaagcttccgactattttgccgcactcaagcagggcggtctgctggtcattacggtagcccgcccggacacccgactttcccggacactgcaaaaagcggggttcgaagtaagcacggaagccgttccggcctcacataaaggaaagaaaaccgcttttcacaccgttattcttggaaagaagggacgtttcgtccccttctccgctcaccagtcctgattccatcctattattatgaactgcacatcccttaccatggccggacttctggccgccctgtccctgggaatgccctccctggcggattccattgccccgggcattcttcttcccaaaaaaaataccaaatccatttccttctcccccaaggggacctcggacattttcctgctcggcatcatgccgcagggaagttccgtcaagaaaggggaatccgtagctcaggcggacttccgcatactggacaatagcatcgaagattatgaacgcgccatcaagagcaagaacctggaggtgctgaaactccggtacgccctggaccagcagaaggaacgttccgccctggccctgcaaaaatatcagacggccctgacacggacggaagaggatcaaaaggattttctggaaaaacggaaggcccgcatgctggcggaagaagaggaacgcgtcaacaaagccctgcgccacatgtcctacaaacaggaagagctgaaccagcttaccaagatgtacaaggatgaccaggtggcggaagaaacggaagagatcattttgaaacgcctgaaaaatgaacttggtgaaagcgaatttgccgttcagggagccaaactcgttgcggaactggccaagctgcgcaatattcatcgcctgggggaagactatgctacggcagtcaaggaaaagcagatggatctggaacaggcacggaagcaggcggattttgatctggaacagaaaaagatagccctgacggaggcggaagtctccctgagacgccttcagaataagtacaatgaactgaaagcagaccgggaaatggcctctttcaaggccccggaaaacggcatcctgctgtacggcggatatgtggcggacaagtgggtggccattccggtggcggaaaagctgaaacccggcggcaaactgggagcttttgacaaaatcgccaccatcgttccgccagactcggaactgattgtccaggctactcttccggactccaccgctacgcccaaggtgggggaaaccgtcgtcatcaaaataacgaacatgcagattcccggcgttattacggaagccagccccattccgggagcagacggcaagcgccgcattatcatcacgcccaaggttcccgccagccagattttcgcccccggccttcccgtccaggtgaccatcaaggaccaacaggcctgatttcccttaacggatccccatgaataaagccgtccttttccttgccgcccttggagccagtacggcgctctgcgctcctattccggcggaaaaagcggaaaaaagggataccattcccattgccagggttccggatgttccgcctccctcccgggaaacgctggacgcttctatccgaaaggcggctgactttctgttgaaagaacagaacagggacggttcctggggaaaccatacgcgcaccaagggtctgaatgttctctgcccttatccggaaggccccagatcattcaggacagcctccacctctttgtgcgtgatcggcctcctgaccagccccctgaaagaagaccccgccgtcaaggcatccctggacaaggcgctgcagtacctgctaaccacgctgcccaccctgaaacggggagacacccgtaccgtgcttggcgtatggggccatgcctacggcctctccgccctgagccgggcggcgcggaaccttcctgcggatgcccctttgcgcgaagaactcaaaaaggtggcctccctccaagtcaaagcgctggaccagatggcggacgtccagggcggctggggctattacacatttgaaactttttccaagcgtcccattggagaacccacttccttcctgacggctacagtccttcttgcctacaaggacgcggaacaggcctttggcctcaaagcggaaccccgcatcgtcaaacgcgccgtcgcctgcctggaaaaactgaggacgcccgccagcagctacgtctattccctttcccattccttttatcccggcaggcccatcaaccgccacaccggcagcctggcccgcactcccgccggggatctggctctgatgcggtatgacccgtcctttatttccaggagtcagctggaagacggcctggaacgcatctggagccgcggaggctggctttcgctggctgtaaagaagcccattccccatgaaagctttgcccagaacgcgggctattttttctattacgggtattattacgctgcccgctgcctggaggaagtggcgccggaacacctggcgcgccatgcggcccatctggcaagcgacctcctgcccatgcaggaagaagacgggtcctggtgggattaccccctgtacaattaccacaaattctacggcaccggatatgccttatatgccgtctcccgcgtcagagaatccctgtatccctctgatgcggcaacaacttcatgacccatgttccgcccgctgacgaccatttttctcgccaccttgtgcctgcatcttcccgcagcgcagggggaatccgtgccagaggaaaaaacggatgttattccaatcgccaaaatcccggatatttcccctgcaaaacccggacaatttgacagggcattccgccgcggcgtggatttcctgctgaaaacgcaaaataaggacggctcctggggcgaccaccgggtaatcggcacctggaacatcctctgcccctacccggacgggcccctcaccttcaaaacagccagtaccgccctgtgcattgcagggctcaacgccagccccctgcatcatgaacccgccgtgcaggaagccatgacccgtgctgaagactatctaatccgtacgatgccccatctgaaacgcggcgacgctctgtgcgtttacaacacctgggcgcatacttacgtgctggatgccatgagcatgagggctgcaagactggccccggacagccttcgctacagggaactgaaggaatgcgcccgttcccaggtaaaaaaacttaatgaactggcttccgccatggggggctggggctacctcacttattccggcttcagcaaacgccctgcggcacagcccacctctttcctgacgggaaccgtccttatctccgcctggatggcaggaaaatcattcggcctttcccttgatgataaaatattcacccgcgcactgaaattcctcaaatcccagaggacgcctgcgggaacctatgtttattccctttcccattccttctatcccggcaggcccatcaaccgccataccggcagcctggcccggactcccgcctgtgattacgccatcaggctctgggaaccggaggacatctccctgcgccagcttgtggacggcctggaccgcctgtggagccgcaggggatggctgacgatggccctgcataaaccaactccccacgagagtttcgcccagaattccggctattttttctattacggatactattattcaggaatgtgcctggacatgctggcgccaaaccaggtaaagcgtcatgcatccctgttggcggacgatattctcacccgccagggaacagacggggcctggtgggactaccccctgtataattaccacaaattctacggcaccggatatgccctgtacgctctttcccgcgcctgggacaagctgtacggccaaccggaaccttctccatcctctatttccacactatcccggccatgataaataccatgaaatcgcttttggcgctctgcctgttttacagtgcggcttccgtctccaccgcagaaaccccaattaaacatacttccttcagacccggagaaatctggacggacaacaacggcgcgcacatcaacgcccacggcggcggcatcctgtacgacaagggaacctattactggtacggggaacacaaggtggagggggactcgggaaactatgcccaggtgggggttcactgctattcctccaaagacctctataactggaaggacgaaggaatcgccctgaaggtggtggagggggaccattcccaccccatcgccaagggctgcatcctggaacgccccaaagtggtttacaacaaaaagaccggaaagtacgtgatgtggttccacctggaactcaaggggaaaggatatggatccgcttacgcgggggtggcaacggcagcaaaacccacagggccattcaagttcctgaaggccgggcgagtcaatccgggcaaatggcccctgaacatggataaaaaggaccaaaccatggagacattcaagggagtacccggcctgacttccagcgcgctgcccgaaggcgtacgttccgaggatatgttcaagaaggattttgaaaaaggacagatgagccgggacatgaccatttttgtggatgacgacggcaaggcctaccacatttattcttctgaagaaaacagcaccacacacattgcggagctgacgccggattacacggggcatacgggaaaattcgtccgggcatttcccggacgcttcatggaagctcccgccatcttcaaacataaaggcaaatactatttcatcgcctccggatgcacgggctgggctcccaacgccgcccgcagcgccgtggccaaaaacatcgccggcccatggatggaattgaaaaatccctgcgtggggcccaaggcaggcatcacgttcggaggccagagcactttcatcctgcccgtgcagggcaaacccggaaaattcatcttcatggcggacatctggcgaccgcaaaatgccattgacggccgctatatgtggcttcccatccagtttgacggagaccagatcaaactggaatggaaggacgaatggacgctgaaagacatgtagtacgtttacctccaatacatatgaaaatattaacagccatcctttccgctaatctggcatgctgccttttctccgttgccgcagcagaaaccccaattaaacacacctccttcagacccggggaaatctggacggacaacaacggcgcgcacatcaacgcccacggcggcggcatcctgtacgacaagggaacctattactggtacggggaacacaaggtggagggggacgcaggaaactatgcccaggtgggggttcactgctattcctccaaagacctctataactggaaggacgaaggaatcgccctgaaggtggtggagggggaccattcccaccccatcgccaaaggctgcatcctggaacgccccaaagtggtttacaacaaaaagaccggaaagtacgtgatgtggttccacctggaactcaaggggaaaggatatggatccgcttacgcgggggtggcaacggcagcaaaacccacagggccattcaagttcctgaaggccgggcgagtcaatccgggcaaatggcccctgaacatggataaaaaggatcagacgaccgaattcaccaaggaaatgcccgactacgtccgcatcatccgcagggactatcccggcgggcagatgagccgggacatgaccatttttgtggacgacaatggaaaagcctaccacatctattcctcggaaggcaatatcacccttcacatcgcggagctgacgccggattacacggggcatacgggaaaatatgtccgggcgttcatcaaccgctacatggaagctcctgctatttgcaaacacaagggcaaatactatcttatcgcttccggatgcacgggctgggctcccaacgccgcccgcagcgccgtggccaaaaacatcgccggcccatggatggaattgaaaaatccctgcgtggggcccaaggcaggcatcacgttcggcggccagagcactttcatcctgcctgtacagggcaaacccggaaaattcatcttcatggcggacatctggcggcccaaaaacgccattgacggccgttacctgtggctgcccatgaaatgggagggtgaccagattatcctggaatggaaggatgaatggacgctggatgacctgtaaattcatctccttcctttttatgcaggatacggtttattgcttccatctccttgccggaaggcagaagcggagccttctgtatgccttgtgctccgctctccttgttgcagcagtctggctgcttcatccggaatggcctttctgggcgggctacattgcctgggcactcgcttacgcggcaacgctgattgttcaacacaccattccccttcccatccgctgcccgcactgcggaaacgccgggctttattcagctccgcaaactccggaagaacaaagaaggccggatacaggcatcatgttggaatgccggggttgcggttccaccttttacacggacgcctatttgccctggccgggaaaaattatccgccggcgccccacttgcccggaagaatgggaagaaaaatctgcccgtaaacaagccgggcccgcttcctccggagaggaacgcaggccggaaaggtctttcgtcaacggaggaaaaatctaacgggcttttttggaagccatcacgtaattcctcatgcgctggtctgcgggggtggtggggcgcacgctggtaacccaattgccgtccttatccttctttttgatttccgttctgtcgcggtacaatttcgcggagaaatcgctggaatcaagaacaaccggccccgggcctgtcgtgacaatgggagtgggaggaacctccgcaaccaccgtcattggagcggcaagggaattataccagtacaccagttcctgctggccgacaggatcgtccggataaggagcataagctccgttattggtggaaacctttacataggccggttccggaaatgtggtctgataggaagagggggaacaggcccccaacaacaaaaggctggctccgccggcaataatcatggaatgcagtttcatataggcattggactcccttccgccacctgccgttcagaggatgtacggttccggaatattacgggcacccgcgcgtcttgcgcttgagcgccattcccagcgccgtacgccatcatgcggaggaaaggagcttgccgtccccccggcggcatggttgaatattatttcctctccatgattacggatttccggctgaaagtgtttgaaaccgtcgcacggcgcctgaattttatgcgcgcggcggaagaactgttcatcacgcagcaagccgtcacccggcatatcaaggaactggaacgtctgctggatgcccgtctgttcaaaagggagggacgagggattgccctgacggcggaaggcgtgcgcctgctggcccattcccgccgcatcctcaaggaatacgaaacgctggctgaagaaatatcctttggccgcaattcccctgtttccggcgaattgagcctgggagccagctccaccatgtcccagtatgtgctgcctccgctgctggccctgttcaaccgccattacccggaaatacgcatatggctgaaaagcggcaatacggaggaaatagaacaggccgtccaggatgaatccgtgcagcttggcatcgtggaaggcacggcaacgcgcgcggacctgcattaccagccatttatggaggacgaaattattctggcaggaggcatgcaggccgccgtgcccagtgaagggctttccctcccgcaactctcccatgtgcccctgatcatgcgtgaaccggggtccggcacacgccgggtggtggaggaagcgctgaaaaaacacgggatctccgtttccggcctccatgttctgatgacgctgggcaatacggaaagcatcaagatgtacctggagcattctccggcgtgctcttttctctcctcccttgccgtccggggagaattcaaacgcggaagtttgaagaaaatacatctccgccacctggaaatccgccgcaccttccacttcgtcgcaggacatggagaccacagcagaatcaatgaactgttcatcaagttctgccgatattattataacaaaatttaattggctataacaatttttaattagattttataatggttgcatcgtatattattccgcagccaattcggtacgctcccggccagatacaacgggcagccgcaaccatcatttaccgaccatgtctcccaaacatctagccaatcccctccacggcatcctgcttattgttctgttttccttttccgctttttacattgcggattttgaatgggtgaaacatctttccctcagcccgctgatcgtcggcatcgtgctgggaatgctttacgccaacagcctgcgcaaccaccttccggaaacatgggttcccggcattcagttctgcaccaagcaggttttgagaacaggcattgtcctgtacggattcaaactgacttttcaaagtgtcatcgacatcggcggctccgccctggcgctcgaccttattgtggtcactctcaccattcttctgggagccgggctggggcgcctgctgaaaatggacagggacacggccctgctgacctccatcggcagttccatttgcggggcagcagccgttctgggggcggaacccgtcgtcaaaagcaaaccttacaaagccgctgtggctgtttccaccgtggtcatcttcggcacgctctccatgtttctgtatccagccctgcaccgggccggaatactggatctgacgccggaacaaatggggctttttactggagccacccttcatgaagtggcgcatgtggtaggcgctagcaacgccatggggcaagctatttccgatccggccattatcgtcaaaatgatccgggtaatgatgctggccccggtgctggtcgtcctgagcattgtcctggcccggagggacccctcttccggcgcaaacggggaaaaacagaaaattaccattccctggttcgccttcctgttccttgccgtcattggctttaattccctgcacctgctgcctgccggacttgtggacgccataaacaccctggatacattcctgctgaccatggcgatgacggccctgggcgcggaatccagctttgagaagtttaagaaagccggagcgcggcctttcctgcttgcaggcttcctgtatatctggcttttcttcggaggttactggctggtcaagctgatcagcctctaaattccaaaaacactcctcctgcggaaagagggcaagtcctgcgccctgcctttccgaacgggagaaaaaagccgtttcaccggcagaacgtgagaaccgtttcagcacaggttcaccgcctcgttccatcctgatttcctgccagaaaatccggttgaaaaggatcaccggaggaaccatgcaggcatgggatgacggaacatgcggagcgccgcatcctgcccgcattactccctactggccacctgtgccgcccaatacagacatcctctctttgctttctccgttgctgcggcaggttttcccggtaaggctcaacaaaaattcatagtcaaaccgtttggagacgctatagtatgcgtacccagttcttaaaaacaaatggcaaccaaattattcattcccggacccactgaagtagcacctgaagtacttgccgccatgagcggcccaatgatgggacaccgatccaaagcggcctccgccctgcagcgccgcatttccaacaatctgcgccgcatcctgctgacagaacaggaaattctgctttccacttcctccggtacgggcctgatggaaggcgccgtgcgttcctgcaccgccaaacgcgccgccattttttccgtgggcgccttcggcgacaaatggtacaagatcgctacgggcaacggcgtgccctccgatattttcaagagcgaactggggcagcccactaccccggaaatggtggacgccgccctctccaccggcaaatacgacaccatttgcatcacgcacaatgagacgtccaccggcatccagaacccggtggaggaaattgcggaagtgcttaaaaaatacccggatgtcgtgtggtgcatggacgccgtgagttccgccgccggctcccggattgaaacggacaagctgggcgtggacgtactggtgacctccacccagaaggcgcttgccctgcctcccggcatggctgtctgcacgctatcccaaaaagcgtacgaacgcaccgcctccgttcccaaccgcggctgctactttgacctgcgttccatttacgacaccattcagaagaaggactaccagtacacgaacactccctgcgtctccatcatgtacgccatggacctccagctccagcgcatcatgcaggaaggtgtggaaaaccgctttgcgcgtcatgaagccatggccgaattcgtgcgttcctgggcagatgaatatttcagcgtctttgccaaccgggaccacctttcccgcaccctgacggtgatcagcaacacgagggacattgacatcgccgccctgaacaactccctgattgaacgcggcatgcagctcggcaacggttacggggacttgaagaacaaaacgttccgcattgcccacatgggcgagctgacgatggatgacatgcgctccatcacgtccagcatcgtggatatcctgaagctcaaataagccaggcccctgccctcttttccggctccgtccggaaaagagggcggaacgcctccgccggaacatgaacggaacaatcgccgggaacaggatacatcgcggatatcccggaacttgttcatctttgatcttttccgcatcccggcggcattcgtcatcgtccaaactttcaatcaggcacggtctttcccggacaacccgttctttcaggacttcatttcacgttatttgctgctgttcattgcggcatgcattttggccgggcttgtttccagcattcgcgcgctatatcattcttcccattactgactttccgaactcttccttccatgtccactctccatcccttccccgccctgcgccctcctcgggaactggccgcgcgggtctcctccctcccctatgatgtcatgaaccaccgggaagccgaggaaatggcctccggaaatgacgcctctttcctccatatctgccgttccgacatcgacacgagcgaagccgccatccatgccccggaaacctacgccaaggcccgggaaaacctggaaaggtttgtccgcgaaggttacctcttccgggatgaacggccgtctttctacatctaccgacaaatcatgtgggggcgcgtacagacgggcatcgtcggctgcgcctccgtggatgaatatgccagcggcgccattaaaaaacacgaactgacccgcagggaaaaggaacttgaccggattgagcattttgacgcctgctccgctcagacggaaccggtattcctggcctaccgcaaacatgaaggtctttccaccatcatccgggaatggattaaattccacaaacccgaatatgattttaccacggaggacggcgtcacccatatcctgtggcccgtttccgagcccggcacggtggaagacatccgcaaaagctttgaggaagtggacgccctttacattgcggacgggcaccaccgcacggcttccagcgccgccgtttccgccaggcgccgccagaaacacccggactacacgggacaggaagaattcaactacctgatggctgtcgtcttttgtgatgaagaccttttcatcatggactacaaccgcgtcatacgcgacctgaacggcctgactgaagaggaattcatggaaaaactccgtacctcctttgacataaatcctgtggataccattcccggagaaggctacgccccccgcgccaagcatgagttcggcatgtatctgaatggacgctggtattccgccacggccaaaccgggaaccttcccggccggccatcccatcgaaagcctggactgcgccatcctccaggcgaatgtgctggctcccattctgggcattgacgatccacgcacgagcgaccgcatcgacttcgtaggaggaatccgcggtctgggagaactggaacgccgctgttccggggaaatggcgctggctttctccctgtatcccgtcaccatggccgaccttttccgcgtagcggacgccggagaaatcatgcctcccaaatccacctggtttgaacccaagttgcgcagcgggctttttatccataccattgaacaataatcttttccaccgtaccaacatgaacaaggttcttattcctaccaaactctccgacgtagcggccaacacgcttaaaacggttggctatgaagtcatccaggacgctgatacgcctctggaaaaacaggtagccgcccatccggatgccgtggctctgatcgtccgcagcgaaaaagttactccggaaatcatggacgcccttccttccctgaagctggtcgtccgcgccggagccggttacgacaacattgacattgtatacgcccgcaaaaaaaacgtggacgtcatgaatacccccggagccaactccaatgctgtggcggaagaagtcatggccatgattctggcctactaccgccacatcgtccaggcggacgccaccacccgggaaggcctgtgggaaaagaaaaaatacatgggcagcgagctgaccaaaaagacggtgggcatcatcggcctgggcaacatcggccgcaacctcgtcaagcgccttcagggatttgaacccattctgctgggctacgaccactttctggcacgccagcgcgccctgaacatcggcgtcacccccaccagcattgaagatattttctcccagtgcgacattattaccctgcacgttccgggcggcccctccacccaccacatggtgaacgcggagctcattggaaaaatgaaagacggagcagtgctcatcaactgctcccgctacggcgtggtggatgaagaagcgctggccgccgccaaggccgcaggcaaaaacatcggctacctgacggacgtacatcccaaggatgcgcccggagagaagccttccgcccccattgcggatttgattcttccccacctgggagccaacacccgggaggccaatacgaaagcggccaaacgcgccgcagaacagatgatcgcctatttttccgacggcgacacctcctgcgtggtgaacggggaatcccccaacggcctcaatccggcccatcttcaactggcgtttctgctcgcctccctggcgcgcaaggccggcggcaacaagcccatccgccgcgtggaatgcactttttacggcaacctgcgcattttccgcaaatggtttacggcccccattctggaaggccttctgccgcatgcggaaaaagggctcatgcctgccgccgcggaagaatccctgcgggagcacggcatcgttttcaaagcgagggaacccaaagacgacaaaccctatgaagattccatcacgctggatgtggccatggaagaggaagaggaatatttccacaccagcgtgcgcggcgtggtgacggaaggtatccccatggtctcccgcctgaacaatttcaacggattgtacgcggatctgcgcggcacgacattatgcctgcgctacaaggaccgtccgggtgttatcgccctcatcggctccgccctgtcttccaatggaatcaacattgacaacatcgccgccccggccgaccacgccaccagggaggccctgaccgtgattaagaccaaccagccggtttccgatgagctgctggataaaatcgcgaaagagatagatgccatctctgcgttttccctgaatctttaacagggaaagacgcatttccggaaacctgcttttcagaccgcccgcttccttcatctccggagggaagcgggcggttcttatttctgccatgttgacaaggcttacccatttttataccattgaccgaatcgtcggaacatatccatgcgctacgtactgcttctcctgaccctgttaaccgccggattttccgtctggtactatcaaaaccgcatttccccggaaggaaaggaactggccgcccaaaaaacaacattggaacaggaggccgcaatattggaaaaagccgttatccaatcccgaaagaagctggatgatgcccaggatgccacccgggcggcggaagaagacatagagagattccagcaagtttatctccaacaaaaaaggcagcagcatcaggaaatccaggatgccgcctaccaaaaaagcgtggcggaccagcaggaagaagtgaaggaacacgaccaaaagattgaccggctgcgccgccgcatgaaaaggcaaagggaaagcaccaaatccgccagggaggaactgctccggaaaaaggagggaatgagaacccagcttgacaggctgaccgatcagcagaggagcattcaggcggaactggaacaggcggaacgcgaactggcccaaaaacgggaagaggccaaaagcaggaagaaattgtccgggattgcccctcagaagggaaatatttccgaacttcagacacagatgaaccttatccgccagaaaaccgcagctgctaaggaaaaaatgaaagccgtagatgcggcgctggaaactctggaagaaaagtctggcaaacaggaacgcctgatgcagaaggcggaggagaaactcacccaacagaaaaacaaggttctggccgacgatgaccgggacgaatccgctgtcccggaaccgggcgatgaagacttgctggcgtctgccgaatacagggagctgtccagagatgtacggaaaactctggaacaggcccgtaaaaaagaagaacaggcatcccgggcctatgacgaagcccgcgcggccatgcggaaagtctccagggaagaagtgaaaaagctggcaaagaaggaaaaagaccatgcctcctttcagaagctgttcacgggtgcagcctccgtcgcgggatttatcctgctcctgttcacgggtgcggccttccgcagcagcaacagttgaacgtctgccggaaaatgaaatgcacggagaacaaggaagcacccgccttccctcagggagtcgttgacggacggcagggatatgatagtctcaggccagcctgatcatgctcacactggcccagattcacggacaaccggaaattttccattccattcagggggaaggagtctcccagggaacaccctgcgttttcctgcgtctggcaggctgcaatctggcctgttcctggtgtgatacggcgtattcctggaacggaacggctcccggagtgcgcctcgcgcctgaaaaggcggctgaactggtgctccattatccatgccgccgactggtcctgaccggaggggagccgctcattcagcaaaaggcgcttcccgccctgctgcgcctgttgccggatcatgccgtggaaatggaaaccaacggcaccatcatgccggatacggaactgctgaaacgcgtcacgcaattcaacgtatctcccaaactcccccattcaggcaataacgacgttaagacttggaaaccggatatcctgcgctgtctggcgggtacggagaaagcctggttcaaattcgtcgtggcgtgcgaggacgatgtcagggccgttctgcggcgggcttccgaagcggacattcccccggaacgaattctgatcatgcccctggcctccacacgggatgagttgaacgccatgcgtgcgcaggcggtggaatggtgtctccgctacggtcttcgtttttcagaccgtctgcatatcgccatctggaacagcaaaaaaggcgtttaagcacgctcctgactcatcaggaaagacaaatgcttcccgcttttccggccggaattccgcaagcctccaaggctctgcgccatcgggaaacctacgctttctgtttcaaatccagcagcatctgggtattgctggggtatttgttcaggaaaaacaggaaccgttccatggcttctacgggtttatgcccggctaaagcgcggcggatcagattcatcttgtacagccatgcttccggcataatgagctcttccctccgcgtccccgatttcagaatgtccacggccgggaagatatattgctccgcaatgcggcggttcagcaccagttccatattgcccgtccccttgaattcctggaaaatcaggtcatccatgcggctgttggtttccaccagggcggtggcaatgatagtcagggaaccggcctggcgcgtattgcgggcggcggcaaaaaggcgccggggcatttccagagcgcgggcatcaatgccgccggacatcgtgcggccgcttcccttgtcagcgttattgtaggcgcgggccaggcgagtaatggaatccatcagcaggaaaacatgctgccccgcctctacaagccgtttggcgcgttcaatgcaaagttccgccatgcggcagtgatcgcgcacccttccatcattggaagaggcgtatacttcagctccggggagggaacgtttaaactccgtcacttcttccggacgctcgtctaccagaagcaccatcaggtgaatggaatccctgtaattctccagaatggcttccgccatgtgctgaagcagcgtcgtcttccctgcgcggggcggagagacaatcaggccgcgctgaccgcgcccgattggagcaatcagatccaatgtgcgggtggtgtaacgctccggccgggtttcaaaggaaatgcgtttattaggattgaccgccttgagctcttcaaagtgcgggttcttgcgcgctttctccggagcaaccccgttaacggaggcaatttccgtcagaagaatgccgcggtcatgacggcaggcctgcccatgcacccacacggcaggacgcagaccgaacctgcggatcatatcctgcggcacataaacggcttccgcaaaagcgtcaaaatcattatccggcttccttaaaaagccgaaccccttattcgtaatttccagcaacccgtccaccggttccggcggcgccagtccacggggggcgctgttctgtggggttccgccctcctgattattattccagcggtttttaacccggtcattgccgtttctgccattgcggccatcctggcgattattccggtttttgttgaaacggtcgttgttattccggcggttctgcctgtcaaaacgctgcctttgcggctcatttgtccgacgcggctcccgggcggcatcttcggaaaaatccgccgcaccttcctgcaccaccttgatggacggaacggaagcatctgcctccggctcctgttccctcggtttcctcacaaatctctggcgaataaccttcggcctgccttctgcgggctgctccggaacagaatcggaagaatcggaagccggctcggcaggcgccgcatgaacggcaatttccgcctcagggctggctgaatcaccgttctccggagcaacagccttggcagcacgcctgcgcaccggcttgacggcggcttccgttccggagacaatcgcagagccgtcagtttccggaacctcctccacaggcttcttgcgcgggcgtccgcgccggggcctggcaggaacatcctgcgcttcttccaccgggatttcagcactgctcttacgggaagtcttcttccccggcacatcgacactttccatcccatcatccgccaattcagcaaccttcttccttatcgtccgcttgcggggcgccggggaagaatcctgttccgtcccgggcacttccgcagcagtctggggctttaccggagcttccgccgcagacttggttttgcggataatacgttttttgggcgctagctccggagaaacctgttccggagtcaaatctgggggggtatcagacatggaaaagaaaattgaactgcaacaacaggcgtctcctgaaggacaacagcgttaaccaagctgctcaaggatttcttccgccacatcgaaattggagaagacgttcagcgcatcatcatagtcgtccagcgcttcatacaggcgcagggcggccttcgccgtttccagatcattaatcacggaagcattctgcgccacggaaatcagcttcatggaaattaccgtatgcccggcttcacgcagggcggcgcacacgttgttcaactccgttgggctcgtaacaaacacccattcattgtcggaatccccctgttccacatcatccgcgccgcattccagcgccagatccatggcggaatcctccgtaagaccttccgccatgatgcgggcctctcccttgcgttcaaactggtaagccacggaaccgggcgtaccgatgctgcctccgtttttggtgaacagggtacgcagctcggaagcggaacggtttgtgttgtccgtcgccacttcaatcaggaaagccgtgcctgaggggccgtagccttcataggtaatctcctggatggtagctcctcccagttctccggtgccttttttgatggcgcgttcaatattttccttgggggtggacacggccttggctccgtcaatggcggcgcgcaggcgcggattcagatcaggatctccgccgccgcttttggcggccagcatgatttcatgggcaaagcgggcaaaaaccttgcccttcttggcatcttccttagccttaacgtacttgatcttagaccatttattatgtcctgacatagaattgggaataatagtaagtgtaggtgaaaagagacaaactaacaagtggaactgttctgcaacccggggaacacattgtcatttgcaaataccacgcaggaagggaatcagggtgcggccatccgtaaatatgttacaggtaccggatactctgccggggaacacgccgcgcaccttcaggagctccggctacctcttggcagtcactctcaacacacgcaaaataacgtattccccagcattggcaatacttttttaggtcacggcaaccggctgctttcagagctatcttctaccgccttcaattaatttttaatatattttgattatttaaaataataaatactgtttctttaatagtgaaaataaaaaaatatatccgcacagcaggctcctgttacgcatccagccctgatggtgcagggggtgattccgtcatgggccaaagcctgagttctaacgccgcctctgttatcattgactaagaaagggaggcgggcttagatatgcccttctttctttttccctgtcttatggaacaagcagcgcaccaggaaaaatcacatgcggccctttcctccgtcctgtggtccgcctttttaacggtcatcaagctctgggccggcattgtaaccggcagcctcggcatcatttccgaagccctgcacagcgggctggacctgatggctgcggccatgactttttatgccgtaaaagtggcgtcccgccctgcggacgaaagccacccttacgggcacgaaaaggtggagaatctttccgccctggcggaaacagccctccttttagttacctgcgcctggattgtctgggaggctgtggaccgtctgttctacaatgaggcggagattaccctcacctggtgggcttttgccgtagtggccgtctccctgctggtagatgtgaaccgttccgccatgctccgccgggtagccaaaaagcacaaaagccaggccctggaagcggatgcacttcactttaccacggatatctggtcttccgcagtcgtgctcctgggtcttttctgcatctggctggcccatctggtccccgcggaatcagcctggcacggcctcctggagagggcggatgccattgcggccctgtttgtggcggctctggtttgttccgtggctttcggccttgccaaacgttccatccacgccctgatggacggcggttcttcctccctgacgcggcaggtgctggacgccatgaaaaagaatgccccggattatccggtcaaacgcatccgcctgcgtgacggaggctcgcgcatctttgtagagctggatgtggaagcgcctgcggaactgcacgtggatgacgcccatgatgtggcggaatccattgaaggcattgtaaagcatgaattgccggaagcggacgtcatcgtccatatcgaaccggcgcgggagaatctttccaatatggagccggacatgattatccaccggctggccttgcgccaccatgtccgcattcacggtttttatgcaggccacggcaaacaggccccctgttatttcatggatgtggaaattccggcggattggcccttggaacgcggctaccatgtggtggaggctttcagggattccattctgcatgaactcaagccggaaaaggtaatttgccgcattgaaccggattgccgcgacatggaaacaggcgccattgcggaacaggtttctccggaggaagtgcgcctgaaggtaaatctcattctccagcagcacagaaacatccgcaagatcctcaagctggacctgaccagggaggccaatttcccaaccttgacctgtgtgtgttccgtggacgcctccctgactatccgggaatgccaccagatcgcctcgcagctggaaaaccagatagaaaacgcactgcaccacctagggcgcgttaccgtcattcttaaaccgtccaagcagaacagaaattgaatgactgttgccggattcccgtaaaaacatgttccgaatccgggaaggagaaacggtgtccattccgggcatgggaacctccgcccggacaaagcggagccaacgattatgaatggcccgcaacggaaactccgggcatttccctgtccagctccgcgcgaatgcgctggcgctcggaaacgatctgctcgtcgtccgcaccgccttcccgcaggaaatattccgccatggacagggctacttccgattccgaggaaaaaacctgggaagcgccggcttccttcagtatatccacgtccctcatgtacttggtgtgaatcatcacgtcaatatgagggttaagctccagagccacgcctactatctccttggcgtccggaatggaagcagagagaatcaggctttccgcatattcaatgcccgcatggcgcagaatttcccgctggctggcatccccgtaaacaatatcccctccctgctcccgtatagcggtaaccgtgtctatgttcatttccacgatgatgacttccaccccgttgtcattcaatatcctcttaagaatgcgccccgtggggccaaaccctaccaataccacgcgccgcgcatccggagcgggcaaggccatgctgttcacgccccccgggtccgcaagccctatgccgcgtttttgcagccatttgactgcaggtccaatctgtcggtacaggatgggatttaaggaaatggagacgacagccgccagaatgatggcctgattggcatccggaggcaggatgttgtacatgagacctattccggcgagaatgaaagaaaattcacccacttgagccagggccacggatacgctcaacgccagcggcaccggccgcctcaggcaacgaacaaccacataagccgccagcggcttgccgatcatcaccacccccagcgttgccagggccagaggccagcaatcccccacggacatcgggtcaaacatcatccccacggaaacgaagaagagcaccgcaaaagcatccctcatcaacatggcttccgccgccgcgcgcgcgcagaagtccgactggcctacaaccatccccgccaaaaacgcccccaaaaccatggaagcgccaaagaattccgcggagcacaccgccacgcccagcgcaatgaccagcacagccagcgtaaacaaatcacgcgcgcccgttcgggccacgtaccgcagcaccagcggaatgacttttttcccggcaaacagcgtcagggccaccagcagggccagcttgacgaacatccagccaagctcggaaagaatgccgccccagtctccggcgccgctctggcgcgcttccatcacggcgggaatgagaaccagcagcagaatggtaaacaggtcttccactaccagccatcccagggccacatggccgccgggcgtatggaggttctggttgtcttccagcacccgcgtcagcactacggtactcgccacggaaatcgccatgccaaaaaccagtccggaaatcgcggaccatccgaacatccacccgaccagcacccccagcacggtagccacggatatctgcacaacggctcccggcacggccactttttgcacggcaatcaaatccttcaaatggaaatggagccccaccccgaacatcagcaggataacgcccaactccgcgaattgttccaccgtatgggaatccgcaacaaatcccggcgagtacggccctaccaccaccccggccagcaggtagcccaccagcggggataaatgcagttttctggcaataaggccgaaaagaagggcagcggccaatccgccgacaaaagtgagaataaggctgaaatcgtgatccatacgcgcgtgacagggataaggggtattcttgaccgccaagtcgtttttacgctatcgcgttttattttccctcacaagaacgcattgcgccgcatggaaatgcagtcgcactttttgcatgaaaaatggtcccgtcaaattttcatcataccctatttgcgaccgcttctaattaaattttcccatacgggattcctatcaaacgtgttagtaaaattcgtcctgttcattcccgggaagctgccgggtcattgtcccgcactggcggtcggacaaatacccatacatcaccatcggcaatttttacatcctgctgccggacaacggaaataatccgccgacccggaaaatccaaagcaggaacgcccgccgggcagacactttcgttttcaggctcttccatactccatgcccatacccctgaacttggaaaaattgataaaatacccccaattccatttgaatttccaggaaattaatttattttatattggaaataattgattttttcaaatctatgactgaagatgccatattcaaggaacagtggaaccttcttaagaaggagatggcaatgggagacgctcatctccagcaaaggctggaacagttcattttccggcaatacggccgggcggttctgacgcattacattaaagccctttccgtcctggagctcagccgccatttctacctgcggttccgcaggaggagccgtgccgtaacggaacccattctctactggaccgtgcttgcggaaacaaccatccacatgacgctggagggagtaaaagacatgcaccccttcatctccctgtaagcacgtgccggcgcaaccttccagcttgacatgttaaaagactgctaccttctttatttgagggaccggggatatccctgctggcccagggtctcccgcagaagccgcatcatccggaacaaatggaacgctccggaactggaagccgcctatttcctccggttgtgccagaacagcacggaccgtcattatgccaacgtgatgaacatcctgctggaagaaatactgcatatgctgattaccctccgccaactcaggaaccacggaaaaaacctgctggaactcagaagaagccggaactccaattcttccccgggcggcgttccgccgccgtccctccgcccgcagcaccctcccgaagacagtctttaaaaccatccgcgctttttccaaaggatacttgaaaaaaccgccgggaccttacaaaatcaacatgcagtctccataggagaaaaatctgtaccgttcccggatggcttccagataggctttcatgaccagctccctacccgcaaaggcgctgacaagcatcagcagcgtgctctgcggcaaatggaaattcgtgatcagggcgtccaccactttgtaattgtagggaggatagatgaagatgttcgttgaaccggaacactccctcaacggcagaccttccgccgttgccacatgttccagcacccgcacgctggtggtgcccacggcaatgacccttctggcgttattgactgcccgggcagcggcttcaggaagaaaaaaatgctccgtatgcatctgatggtcttctatcctgtccgccttgacgggacggaatgttcctacccccacgtgcagggttagaaaatcgtgggggacggatgccagcagctccggcgtaaaatgcagcccggccgtaggagcggcaatggccccttcatgcctggcgtaaacggtctggtaacgctccctgtcggatgggtcgctttcccggttcatataatggggaagagccagacgcccgtatttttcctcatccacttcccggtcaaaccggataaagcggtacccttcctcatcaatgccttccacggtgcccaccgcctctccgaccgcaaccgtacgcccaagcttcattttgcgtccggggcgcaccatgcacttccacaacaggggattaagaacctccgcgcgtactatttcaatggaaccgtcgttggaaaaatatcttgccggaaccaccctggtatcattcagaataaaatgatccccttcccgcacatattccggcaaatcgcaaaaatgcctgtgctcaatcatgcccgtatcccggtgaatgaccatcatccgggacgcggagcggtccggaaggggacggtccgctatcagttcttccggcagcggataatcaaaatcaatggtgcgcacggccaagtgcattgccacgaatcctccgaaaggtcaatacctttaaaccgcaggtaacacaattatatctttaccctgcttcggttcatatggtatggaaggatacatgaacaacctgctgtcagcaaacatttccaacgcaaccgcctgggggaccattctggtcgtcgtcctcgtcatctttctagtcatttttttcgccatcatcgccaaattcttcaagacatggctgcgcgcccgtctggcgaaagcgcccgtctccatgagcaacatgctggggatgtggctccggaaagtgccctatcccctggtggtggacacccgcattacggccgccaaggcgggcctggacatcagcacggatgagctggaggcccacttcctggccggcggcgacatcgtggactgcgtgcttgccctgattgcggcggagaaagccggcattccgctgagctacgaccgcgcctgcgccattgacctggccgtgaaaggcacttccaagaccgtgctggaagccgtgcgcacctccatcaatccccgagtcatcgactgcccgaaccccagctccggccaaacgcgcctgacggcggtggcccgtgacggcattgcagtggcggtgcgcgcccgcgtaacggtgcgcaccaacctggatctcttcgtagggggcgccacggaggaaacggtggtcgcccgcgtcggggaaggcatcgtctccgccgtaggttccgccccctcctacaaggatgttctggaaaaaccggaggtgatctcccgtaccgtaagcgacaagggggtggatgccgccacggcgtttgaagtgctttccattgacattgcggatgtggatgtagccggcaatgtgggcgcccgcctccaggccgagcaggcggaagcggacaaacaaatcgcccaggccaaagcggaagtccgccgcgccgccgccgtggccacggaacaggaaatggctgcaaaaacgcaggaaatgcgcgccaaggtggtggaagcggaagcccagattcccatggccatggcggaagccttccgcaacggcaatctgggagtgctggactacgcccgttaccaaaatgtggtggctgacaccaaaatgagagattccatcgctcaaccggatacgcctccctcttccatcaaataaataaattccctggtttccggaaaggtctgctttttccggaaacctttatcctttatggatttactggcatacatgctcgcctccggaggcgatgacaatagcctgaaactctggttctggctgattgtcggggtgattttcctcatcaaaaaagcaatcgaattgttgaaaccggatgaaaaggatgaggaaccgtccgttccggacacggagaaccatcatgaaaaacgcgtaagggaagtcattgcggaaatgcgccgggcaaccccgcagccgcagcaaacccaacctgccgcaccggcccgcgcaccgcggccctcagcccctcctgtagagcttccctcccccgccgtggcccgcaaaccgcagccgatcccggcgcaagcggctgcacaacccgaggaaacagcccggcagacggcgcaaaatgtactggaacgctacgtaaaagctacggaagaagcccggcaatccatgcgctctctttccgatgcggaacaggcggctctgcaacgtttgcaaaagagggagatgaaggaacatctgcccgaccttcttccgtcatccgccgcagtggaatctccttccctgaaaaattcccttcaccaccccaaatccctgaaagcggctgttctttatcaggaaatccttggaaaacccagagcattacgaagcgcatccttcagcggtgaataaagaatggcccttcccgggccatgttccgttcagccgtcatgctgcccccctcttattcattctcccttgcctgaaaaggtaagcggaggtaccctccatcccgcaatgacagacacacctttgcagatagccggacgccagttcacctcccgcctgatggtgggaacgggaaaatttccttccaatgagagcatgaaagaagctctggaagcctccggcgcccaaattgtgacggtggctctgcgccgggcggatctgacgggttcccacgatcccgccgccaatattctggatttcattgatccggaaaaatacctccttctccccaacaccagcggagcgactacggcagaagaagccgtacgcctggcgcgcctggcggcagcagccgggctgcccaactggatcaagctggagattcacccggacgcccaatacctgatgccggaccccattgaaacgctgaaagcggcggaaatcctggtcagggaaggcttcaccgtgcttccctacattaacgcggaccccgtgctcgctaaacgccttcaggaagccggagcggcggccgtcatgcctcttggcgcccccatcggcaccaacaagggagtgctgacccgggagttgattaacatcatcattgaacaggctattgtccccgtggtggtggacgcggggctgggagcgcccagccacgcggcggaggctctggaaatgggagcggatgccgtgctcgtcaatacggctatcgccgcctccggctctccctccgccatggcggaggcgttcgccctggcatgccgtgccggacgcatggcttatctgtccggccttcccgccgtttcctcccaagctacagccaccagccccctgacttccttcctgcattaaaaggccgggaaaaagccccggttttttcccgcacccatgggtcaagaaactccgggaacatttttcgcaatctttctgcgtatcaggaattccaggatgaagcaggcggctacaaacagcacaatcaacggaatcaggtaaggctggctgaagaacatctggtaaaagaacgcccccagaataaacagcatcagaagaaagcccaggatgataagcagcgcatttccctgagtctctttccggagccgccaatgggcgacgaacaccgccaggtagctgatcagaaaacaggcccccgccaaattggcgatggctaccaggttaaaggcattcgtcatcaccagaatccccagcaaaagatagaaaaaaccctccgttccgtggccccagaaaggctgtttaaaaatagctcccagctggccgttgcgcgccagagcccgggaaatgtccagcatgctgaacatggtggcattaatggctgatgccgtggcaatgagagccgctacggatacggccatgaagccccacatgcccaaaaccggataggcagcctgcgctacggccgtttccgtatggctttccagggaagtagcgggaacgttggacagtactacgtaggagagtatcaggtacagggccagcacaaggccaatagccataaaaatggctcttggcagcgtcctggaaggatttttcagattgcccgccgtattggccatcattccgtagcaagcaaatgcgaaaaatgtcaatcccacgctgcccagcaaaccgtccagccctttcaccggaatgggatccgcgcccacaggcacggaagaaccgaagctggcaagcattaaaaccgtcaaaatcaataatttgaatgccaccatgattacttccgactttccaacggccctggctccccccatattcaatgcccccagcagcaaaatagccacactggcaaaaagggccgtggaataaatggtgactgccctgtccggtaaaaacaggcgggacgcataggctccaaaggatttggccaccagagccacggtaatgaccagcgttcccaggtaaataagggtcagtgcgccggacagggtcttatgggaaaaagcctcgttgaaataatccataattcctccggaaccgggataacgggaacccagtttggcgtaagtgtatccggaaagcagggcagcaacgcctcccagaataaaggaccaatatacgttttttcccgccatcagggtcgcctgccccatgagggcgaaaattcccgctcccaccatggaccctattcctaatgcaatgacgctccacagggacagatattcttttggggccttcccgtacataagggatttagagatactacaggaatgaaacgttgacctttccgcacgggatgacacgtcctgcttattcatccgtcctgcagccccatcatgactattccggcacggctttccccttgaaccgtccgttgtcggcatgtagggtacggctgatgatcaaaaccgccatttttgattttgacggaactcttgccgacaccatacccctgtgccgggaggcttttcgccgcgctatccggaagctggacggcagaatattgacggatgaagaaatcgaacgccaattcggcccggacgatctgggagttatccagaaattgattcccgggaaaccggaactgcatgaacgcggcagggaactatttatccactattaccgcaagctgcacgcagacctggctcccgcccccttccccggagcagccgaattgctgagcactctccgcaacctcggcattcggctggccatggtcacaggcaaacgcctggaaagcgcagagatatccctccagttttttcatctgtccgaattttttcctattctggaaacaggctccccggagggaggcgtaaaaccggaccgcatcaaacgggctttgtcccgtctgaattccgtcgcctcagaagccatctatattggagacgcccccacagacgtggacgcatgccgctctgtccctatccgcattctctccgcaggatgggccgcggaggcggacatcaacggcctcagggaaaaaaatccggactttctcctgacccgttttgaagacctggaacgtttcttccgggaacatcatgaaaatgaaggcctttaagattgcaatcctgcagaaaacaggctaccattacccactccgttaatatcaatccttccatgacttttcagaaagaatccggaaaagagggcctgaaaattctgctcatgctcgccagcgtcattatcatcacggccgggctgcaggcgggaaaaccggtgctcctgcccatcgttctatccggctttctggcaatcgtcagttatccgctgacgacttttttcaagagccgtctttgcttcccgcactggctggcagtgactttcacggtcatcatggactttggcattctggtgggcctgggctatctggcccaatacctggggcaggatctggccaaaacggtcacggtcaaataccagcctcttatgatggagaaaatccatgaactccgcgctttcctgattgaacaggactggaacaacctggctgaccagatgcttcaggaacttccggacctgctcaacggccagcgcatcgtggcgttttccacaggggtgatggggcagttagcttccatgctgaccttcactaccctgattctgatcctgatgactttcttcctgggggaagccccccgcttccgggcgaacatcaataaactggggcataacagcgacacaggcatccgcaaattctccaaggccctggccggagttcagaaatatctcattattaaaaccttcatcagcgcagttacagggcttctggctttcctgctttgctattacatgaacgtggactttccgctgttgtggggcatcgtggctttcgccctcaacttcattcccaccttcggctccatcatcgcggctatccctcccacacttctcgccatgcttctgatcagccctactgcgggcatcattgttgccggcggctacctggtgatcaacacagccctgggaaactgcctggaacccatgttgttgggacggcaattcggcattgtgaccagtatggttctgctctccgtcatcttctggggctgggtatggggccccattggcatgctgctggccgtacccattaccatgttgattaaactcgggctggaaagctccaaggatctcgcctggatcgcccagctcattgacaaccctcccactcccagattccctctcccccctctccattccgggaaaaccaacgaaagcacaaccaaggaataatccatgcattcattcgcttacaaaaacggcacgctctactgtgaaaacgtcaaccttcaggaactggcggacaaggaaagcacacccctgtacgtttatagcaaacaaaccattttaaaccactttcaccgcctcagggaagctctggcaccgcttaacgcggaagtggcctacgccgtcaaggcctgctccaacatcgccatcctgaacctcatggcccgcaacggggcgggattcgacatcgtctccggcggagaactcttccgcgtcctcaaagccgggggagatccgtccaaatgcacttatgccggcgtaggaaaaaccgagcaggaaatccgttatgccctggcgcagggcatttattgcttcaatgtggaatccgaagcggaactgcgggccattaacgccattgccgcctccatgggagtcaaggctccggtggccgtgcgcgtcaatcccaacgtagaggcgggaacgcacaaatacattactaccggcaaggctgaaaataaattcggcgtggacttcgaacgcattgaatctctttatgagatggcggcccgcgaacttccgaaccttcatctgaaagggttgcaaatgcatatcggctcccagcttacccaggcgaaacccttcctggaagccgtcaggaaagtcgcccccctggctgcttccctgaaagaaaaacacggcattgaatttttctccatcggaggaggaattggcatcgtttaccagggcacgctggattccggcgttcaggaatggtggaatgaggactgcgcccagctcacgctgagcacttacgcccaggccgtcgtccccaccctgcaacctctgggattacacatcattgtggaaccgggccgtcttatcgtaggaaatgcgggagcactcatcacgcgttgcctgtatgaaaaaaacgggaaagccaaaacctttaaaattgtggatgcagggatgaacgacctcatccgccctgccctctaccagggctatcatgaaattatcccggtcagagaacacccctccggatcctgcgtcacagcggatgttgtgggtcccatctgtgaatccggagacttcctcgcccaaaacagggacatgccggacgtgcgccagggagaactcctggccgtactgtccgccggagcctatggtttttccatgtcttccaactacaattcacggcctatggcggaagaagtcctggtggacggggaccaatggaacgtcattcgcagccgccagagctgggaagacctcatccggggagaatccattccggaataacatccccatcccgcccatctttagaatgcccttccagcggtaaaacgaaggaggggcatttcctttcaaccgtactgaatggaaaacaaggcagaattttcaagtccgccaagccacgcggagcttctttccggagacgccgcacgctactgccgtacgggctccggtggaccggtccggccgcaagtcacaatgattcgaacatgaacatgtcccgcaagagcgctgcaaccccggcgtgcgcctgagttcagccttgccctcctgaaaaaaaacacctatcatatccccgttatgccaatagccacaccagaacaatacattaccatgcttgaaacggccaaaaaggaaggctacgcctatccggccgttaacgtgaccacgatcgaagtcatcaacggcgctctccgcgctttttccgaagccaaaagcgacggtatcatccaggtttccatcggtggcggcaaattcgcctccggcagctccgtaggcaattccgcccttggcgccattgttctggcggaagcaacgcgccgtctggctgaaaagcacaacgttctcgtagcccttcacacggaccactgccagcccgaacatgtggatactttcctgcgtcctctgattgccgaatcccgccgccgcgtggaacgcggtgaagcccccctcttcaattcccacatgctggatgcctccacgcttcccatggcggaaaacctcaagctttcccgggaactgctgaaggaatgcgccgaactgggcatcgttcttgaaatcgaaatcggcgttgtgggcggagaagaagacggagtggacaactccggccatcccgccgacaagctttacacttctccggaagatatgctgatgacgtatgaagccctcgcgcccctcggcaaattcatgctggccgccactttcggcaacgtgcacggtgtgtacaagcccggccacgtcaaactgaaacccagcatcctgcgggacggtcaggaagccgtggtagccaaacacggagaagcggctcgcatgcccctcgtcttccatggcggttccggttccgaactttccgatatccgcgaagccgtttcctacggcgtcgtcaagatgaacatcgacaccgacacgcaatacgccttcacccgcccgatcgtctcccacatgtgcgaacacatcaacggagtgctcaagattgatggcgaagtgggcaacaagaaggattacgatccccgttcctatcttgccaagggtgaaaagggagtcgccgcccgccttcaggaagccgccgacaaccttatgtccggtagcaagaccctctttggcaaaatctaaaaagagttccctcaacgagtttaatgccatgcccggtttcttaaaagaaaccgggcattttttctggaaaaacccgccaacagggtaaggcgggaaacgctttcaccgagtatttatccctctgagacgacgggaaaacgaaccgttccccgtcttcttcttttctgtcccctgggcttctccgattacgggaccattaacccgcattcttccgcaaggaaaccgctgcggacaaataaaacgatagccgcacaggaaaaaccggaattattcataacagaacaaggccattcctccgctcagcggaccgcagagaacccggcagcgcggccctaccccggcgccgctttgaacacaggagcctttccccagcgctccaggaaccttaatttcctgctttgcgggattcccttacgcggtcattggcgttcaggatgcgcttgcgcagacggataaaatgaggcgtagcctccaccagttcatcaggttcaatgtactcaatggcacgttccagagaaaaaatgacgggaggggaaagctggatgccgtctcccttcgtggctgagcggatattgttcaaatgcttttccttgcacgggttgaccggcatatccatctgccgcgggttttcgcctacaatctggccttcgtaaatatcttcctgcggccccacaaacagacgcccgcgttcttccagcgctaccagcgcgaacggagtggaaacgcccgtctccatggaaaccagggtgccggtggtacgcgtggtgatgtccccggcataaggcccgtaatcccggaacaggtgggagaaaataccgtggccggacgtcagattgaccagctcaaattcaaaaccgataataccgcgggtgggaatataagcctgaataaaagtatggcccgtgccttccctgcataccatgtcttccatctgtcccttgcgggcgtgaagaagcttcatgacgccgttggcatgttcgtccggaacttctacgtacatcgtttcatacggttccgtaaggcggtcgttttcatccctcttcatgatcacggtgggacgggaaacgcacagttcataattttcacggcgcatagtctccaccagcacggcgatctgcatggcgccgcgggcggaaacggagaaaacgctagccttgtccgtatcctccacctggatggaaatattcgtccgcatttccctcatcaggcggtcgcgtatcacgcgggaagtcacattcttgccgtcgcgccctccgaaaggcccgttgttgatggaaaattccatggaaatggtaggaggatcaatcgccacgaatggaaggggctccgtatccgcggaaccgcccaaggtttccccgatattgacgttttcaaaccccgccacccctacgatgttgcctgccacgccgatggccgaatccgtagtgctcaggccggaatattcaaacatgcgggtcacttttccggaaatgcaggagccgtcgctctgatggagccacacggtgtcccctttcttcacagtgccggaggtaatgcggccgatagccacacggcccacataatcgtcccagtcaatattggaaaccagcatcttgaattcaccctccggatcggcatccttcggagcggggatatgttccacaatcttgaataaaagaggagtgcagtccacaggaggttccccctccatggaattcatgaagtaaccgtcgcgggcggaaccgtacacgaaaggggcttcaaattgttcatccgtggcgcccagctccagaaaaagctccagcacctggtcatgcacggcggcgggatcggcatgcggacggtcgatcttgttaatgacgacaatgggcatcagcccttcctgaagggccttgcggagcacaaaacgcgtctgggcctgcggcccttcaaaagcgtccaccaccagaagcacgccatccaccattttcatcacgcgctccacttccccgccgaaatccgcgtgtccgggagtatccacaatgttgatcgtgtatccattccagaggatggatgtattcttggccttgatcgtgatgcctttttcacgttccagatccatggaatccatggcgcgttcctgcacggcctggttggcccggtaggcgcctcccgcctgcaaaagttggtcaaccagggtcgtcttcccatggtcaacgtgagcgatgatggcgagattgcggaacttggaaggatctgacattgcgcgcgagagctaaaaacaccggaaaataaatgtcaagtctgctccatgaataccgactatattttcagcgtttgcaagcctccctgccgccattgccgcaagcgatggaacttttattttcttccggtgaatttatagcttccccccctcctcaaataggagtattctgctccggcataagtaatttctcaattctagataacaatgaagatttggttagatggaaagctggtggaacaggaggaagcaaaaacctcggttttcgaccacggcacactctatggagacggcatttttgaaggtatccggttctataacaagcgcgttttccgcctggaagaccacatggaccgcctgtacaactgcgcccattatctgttgctggatattccttacactcaggaagaactctccaacgccgtatgcgaaacggtcgcggcctccggcctgaacgacggctatatccgtctggtggttacccgcggcgtcggcaatctggggctcaacccattcaactgcaaacggtcctgcgtcttcatcattgcggataaaatctccctgtacgatccggacgtatatgaaaacgggctggccctgattaccagctccgtgcgccgcaaccgtccggacaccgtttgtccgcaggtcaagtcgctcaattatctcaacaacatcctggccaaaatggaagctgtgcgccagggtgcggcggaagccctgatgctgaacgacctgggtaatgtggccgaatgcacgggcgacaacattttcatcgtgaaggacggtaccgtgttcacaccgccagttacggacggctgcctggacggcatcacgcgccgggtaatgctggaaatctgccgggagctgcaaatcccggctcaggaaaagaccatgaaccgctttaccatcacctgtgcggacgaatgcttcctgaccggcactgccgcggaatgcgttcccgtgaccaaattggacggctatcagctgggctctggaaaaatcggtcctgtcacagctcgaatcctggcccgtttccaggaactggcccagaccacgggaacatcctgttagaaccagccaacccttttttggaccaacgaaaacggctccgccagatgacggagccgtttttttgtgctattccgttaaatataaaaaagaaaacacaggtaagcacattcccgcagggctatacggcagtctcctctggaaatgaaggcttgtgaccttcacggcctcccgttccgaaacgctgcagaagaatccaatatgaaaagccgcgccgcttgtgaaatgacaaggcaagcgacatcttgcatgtccggccgccacgccggacatgcctcaacctgaaaaaaggctatttcttcttgggcaggccggtttccgggtcaaactgcttagcctgctgggcatgttctttcgtctgatagaaccgaacgtaatcaatcaggaattttacaggatacccttgcccgtctttaggagctttctcgcaccaggtgccgcccacggcggaattaagaatgagatagaacggcgtacggaacggattccccgccccattggcataattagtggtattaaggtcaatggacttcaccagcttgtcatccaccatcaacttgatggaatccttgtcccattccatgacataggtatgaaaatcatcggaaagattctctatcttcacagtccctccgcgggaagcgtcccttttggacacgccgtccggactcaagtggaaagtggaataaaccacatccggctgttgggaaatattctccagcatatcaatctccccgttgacgggccagccccatttattcttgccaagcaaccagatggcaggccagatgcccttggttttgggaaccttggcacgcacttccagtctgccgaacatgaaattttttgttttgatcgtcgtaacggaaccggaggtatagggcatgaacttggtattcttgatccaatccgcggaacttttcttataattgacattggcgaacttttcaaaatgggtttccaaaaccaggcagccatcctccaatctcatattcttgggtcggcctgtataagtctgctgggagccctggttacggattactcccaactccggtttccactttttggcgtctatcctggaaccgttgaactcgtcaccccagacataaacccacccgccggggagggtcctcggaggtttggaatcttctccctttacagacatgcaaaggcatgcagtcaacaacacggcaaataggctcttcatacggagcaatactgcacctagttccgcagcctttcaaacaaaatacatcattcgggaccacatacctcctttcccctgtcaaatggcgaaatatcctgcaaaatgaatagaacccttaacccggcgcatgctatggtcatgatatgaaaaccactttccctccccatggccgggcgctcctccaccagacgcctgcaggtgctgtcgtgattgtggaaaacggcacagccgtcacccatcttttcttcagccgcatggcacagccggagcatttggaatgggaggaaacacctctgctgcgtcaaacggctgaccagctggatgaatattttcaaggttcccgccgcgtatttgacgtgccgctttctccccaaggaaccgaatttgaacgaacggtctggaaagcccttcaagccatcccctatggagaaaccagaagttacggagacattgcccggcgaataggacgcccatcagcatgccgggcagtaggacaagccaacaaccggaaccctgtcggcatcatcatcccctgccaccgagtcatcggagccgacggcaaactgaccggctatgcaagcggcctgaccattaaacaatacctgttggaattggaacagggctccgccactcctttcacattattcacggatgtggaacgcatgcccggaaatactccggccagtccataaaacggcaggactggaaaattccggtcagagctgcataccgttttccgtctgaggaagaggcatggatttcaaggcggccttgggggattcaatacccagccattgaagaggcagcaattcacccgttaccctgtaatgtttgtaggttaatccggcaaacacagccagaaaaaatatcaggacggcataaagggccatccataaataatgattccgggtcgtgcgggcggcttcatccgccaactgctgtaagttccgcatagcgatcgaaggagcggcctcttcttctctcccggataattcggcagaaaatcccggagatggctcttccgcaaaccggagcctggcatcccccaaagcgatttcatcgccatcgtaaagggttgcggcgcccatcggcgtcaggccgttgattttagttccattagtagaaccaaggtcctccaggacatatcccccttccttaaactgaagcaaggcatgctctccggaaaccgactgaaagggaagcacaatctcgcaatgctcgtcacgtccgatgcgtgcgaaatattcaccgttcttcggaagaactatggttttttcagaaccgtcgggaaggtggatggaaaggcgtggcatgattcctggaaatcatgccacgcccatattcattttcaatccaaaagaccgtttgcccatcacgtataagaaaaatggcgatatccgcctttccccagaaagacagaattccatgcagattcatgatatgggttcatcctcctcaatttttatttttcccgcatactttcaaaaaatattttaagcaattatagtggcctccggggaagttttccataagtaatccactcattttaaaacattacatgaaatactgaatcaatttttttcctgattggaaacagaccttccgaaactgcgacggatcatgccggacacgaacactgcgcaaacgacaatcttcaagggggacaacttgttgggaatcgctaaacaggccattttcaaacataccgttttccgggagggccaccctcccggaacatagggattggatatacgcgcaaactgccgtcctgcctttggacatgtccttcactatctcgataatttttttatttgcctggagcggcttaaatcaaaagaactcaactgaaattttttctgctgtctggcatctgccgctcctcttcttgcatggagtttattcaccctgggttcccttccccgtccgttacatgcagacgtctgcatgacaccaataaaagcggcatgtcgctgccgctgtccctgattattttaataagaggaatttttctcttcatttattactgtgaagacagccagcatggcacaaatcaatccggggcatcgtaaaaacatccggagttcccgtaatgattcgaaatcctctttcacgggaaagtcagcggcctacaccgtggaaaaaccgtgcagccctgcacatgtcttgcgttttgaaggaaaatgtttcatattcagaccatgtttgttgacaacatccgcatattcgccagggcaggaaagggaggaaacgggctggtcagcttccgaagggccaaattcgtgcccaagggaggcccggacggcggtgatggaggcgatggcggaagcgtcattctggaagtggatccgcacacgaatgacctgcgttcttttttttatgatccaaaattaatcgccacggacggggtaggcggacaaagcgccaagaaacatggcaagaacggcaaatccgtcatcgggaaagtgccccccggtaccattatctaccgcagcaatgcatcctccatggcggaggcgacctggctggaacgggaaggcgaaggcattgaactggaaaaaatagcggatctgacggaaatcggcacccggttcacgttgtgccagggcggcctcggcggcaagggaaactggcatttccgttccgcgaccaaccaggcgcctacggaagccgagatgggaacggaaggggaggaaggcgtcttctttatggaattgcgccgcattgcggacgccgggctggtaggctaccccaacgcggggaaaagcacattgctgggagacatttcggaagccaagcccaaagtagccagctatccttttaccacgcttcagcctatcatcggagtggtggaattcgacagctttcgccgctgcgttgtggcggacattcccggcatcattgaaggcgcacacaacaaccggggcctgggacatgaattcctgcgccacatcacgcgctgcaaggtgctcgtcttcgttctggacatggctggcagcgaaggccgcgaccccattgaagaccttcaaaatctccgcacggaaattaaactgtacagcgaagacctggccaaacagccctggttcgtcgtcgccaacaaaatggacctggaaggagcggaagaaaatctggctaacttccgcatgcgtttcccgaaagtggacatcatccccatttccgcgctcaatggagacggtatttcccggctcaggaacaggcttgatgagcttgtaggttataaattcatccgttaacttattcattcaactttctttcaacctttgacatgacagcccctctctccgtaacgacagcttccgaccagcttctgtgccgtatcgccggaattggagacctcttcgccattgaaggggaattcgtcaccgggaaggaaatacccagcgggcacatcaacaccacttacaaggctacctaccgtaaaagcgacgggacggaagattcctatatcctccagcgcatcaacgattacgtcttcaaagaccccaaagccgtcatgcgcaacgtggaaaaagtcacgcgccacatcaactggaaagtcctgcgccgcctgaaggattccgccgaccaaaccctcaacctctacccggcccggggaggacgcaactacattgacatccccggcgacggcatctggcgctgttacaactacctggcaagcacgcacacctacgacgtggtggaaaacacccgccaggcctaccaggcaggatttgcctttgggtccttccaagatttgattagtgacatgaatccggacgacatcgtggaaaccatacctggcttccatcatacccggaaccgcttcaaccgcctgatggaagtggcggagctggatccgcaggggcgtctctccacctgtctgcctgaattggaattcattaaagcccgagagcaggatgtggatcggttgctgaatcttcaggaaagaggtgttcttcccacccgcatcactcataacgacaccaaaatcaacaatgtcatgctggatgaggacaccgaccacgccgtctgcgtcattgacctggatacggtcatgcccggccttgtattgtacgacttcggagatatggtgcgcaccgtcactccgcctacggaagaagatgaagaagacctggacaaggtgcgcatgcgcatgcccatgttccaatctatcgtagaagggtatctgaccgctgcccacggcttcctgacccaggcggaaatagaccagcttgccttttcaggaaaactcatcacgctggaaatcggcatccgtttcctgacggactatctggaaggcgacccatacttcaaggtctcacggccgaaccacaatctcatccgctgccgtacgcagctaaaactggtggaatgcattgaacaggaacttcctgccatggaacaatacgtcaagcgcgtcgccaaggggatgtccagaaaatagggaaaagcttttccttcttccattccactacctccggggacggctatgccgtcccttcttttttatattatttgaacatgggtgcccattccataatccaagaaacattacacgcaatagccaagccatgtttgaaataccagacatccaactcaatcaatatggcaagtaagcaaggatcatgttcctggctccatatgcccccgacgctcccgatttctccaaaaaaccctacacaggcaatggaggctaccctcagtaccactacaacatttataaagccatccaggacataggctacgatgtcgtctcctcctccaaaccctattccgtccaattcgccaagggaaacgtggactatgtattctccctgatgaacaggttcgccatgtccaggcctgaaatattcatttcttcctactgcgaattcattcaggttccctacttgggtgccccgcccaacatccgcgccatagcggaagataaatttctgaccaaaatggtattccgctccctggaattgaacgttccggaaggcattggactttccagagaaaaaggtattccggcccaggcccccttcccaggcccctattttgtcaaaaagcgttttggagccgcttccggcggcatccgggaagacagcatctgcagctcctggaaagccgtgggttcatgcgcccggcgcctgatggaagaagggcacgaagtgctcgtggaacaatactgtgaaggcattgacgtcaccgttcccatactgggcggggaaaaccccgtcatcctgggatatgtgcagccgaaatctgacaaaccgggcagcatcatcacggaagacctgaaactgcacgaccatctgggttatcaactggtctccgttcaggatatggaacaggacatcgccagtgacatccggaaaatctggagcgctctggggccgatggactatttccgcatcgactatagaatcgacttcgagacgggagaacggcgcattctggaaatgaacatctgctgccacctgggcaaaagcggctccatctgcctggcggccgcagaacacggctactcccaagcggacctcctcaaatacattatcgcctacagcatggacaggcaaaaaaacctccgccaatacggcacatggctcatctgacccgtaggaaacggtcagaacaaaaacggcagttagaaatcaggtatccggctgattgcctcaaacacctcctgccaactttccatggaagcttcctgcccgcccagggccatgccccgctcacgggcggcagcggccatgtcttcccggtagtggggctcccaagccattttagtggcgtacgtgatgaaatccccggggcattcgcacagccatccggtcttcccgtgttccaccatttgttcccaccctccgcgcctgtccacaacaagcacactcccgcttgccatggcctcaaaacccacacgcggccaattctccgtcgtatcggtaggctgcaaaacgatgtggcagcgtcggtaaaactcctgttgggacaaagacttttgatcatggaaagtctccacccaatcgggaggcctgccagtcttcgcctcgctccgctggtcaaaaccgagaaaagttcccctcttccggaccggagaagcaaaatgctcgtaaatatgccacgtatccttgctgaacttatcttcatcctgccgggaaatgtgtccggctccaaaccagtccgaggaacaccctgcaataaaaggaaaatctgccgcatcaaaatacggcctaaacgtcatgaaccggatgaccgggtcgggatttaaagccctcaggcgaggcatgacatttcccattacgttgctattttgataaagaaacagggaaatatctccacgcttcatggcttccttttccctgccgaaaagccaagtcatgcaattgacgaaaactgtccttctcgtccgttttcgtatcttcgggagagcagccagaaactcttcattacaaaaactgatgacgggagcccctgccggaatggcctcccaatcatagccttcatgcaccgtaacacccaaattcatcatctccggataaagcccggcacagtgtgcctttttctgggtggggataagatgcatttccatccccatctgtctccaaaccttaatctggtgataaagttcggcccccgcaccgccgtaaagggatggaaatccaacaatatagagagaatgtatcattaattaatagatttatgtagaatagtcttgccgtaagattttcagaacatttggactattgatattcagaaaattattcagatgaaaatagaaaaaatgaataaaacaaatttaaagtaaacaattccattaatcaataaacatttattgaaaaaatttgcactaaatcttttttcgttctgtttttaaataatattaatatatcacttaaactaaaacatcgatctccacaaaaagatgcaaccaataaaaaacctattcaatttaattctcttctttatcagataacttttgtttcaagaaattaattactttttctgagattcatcatctaaataattggcaaattcaacgtatgcattttttatgattatttccatcgttcttttatctttgggatcaatagctatcgttctgttcccggcaattttttcaaaactatctgtaactaatcttttcagaacgtcttccggattttttcctatgaaatgagccaatatgcttctactattccaatcatatccatgtttcttcatttcattataaaattgattttcaattactttctttttatttaacaaaatcacggttttgaaataattacgttcactcttgttaattatcatttgatttataagaaaacactgaaaaagatatttttgaactatcttcggtaaatatttaacatcgaatttccgataaaaattcatagactgctccaatataaagtggttattttgatcacttaatatagaagaagaatacttggaattacctacagcacgcattaagaatgcagaagattgaagtacatatttttttaaatattcttgttcttttattgaaaaattgtttttaacatagtctgaatcctgataattattcacatcagaatagacactcatcgggaataataaaataaaaaatagaaatatttttctcataattttgtttgatttaattatatatctgtttgcattttaatttacaatttctattttcgacaaaaataaaagctaatgcaataataaatagaatgccttgaattttactttcttctacagacggtcctccaatagaagagttagattgttgtgcacggtcatatgaaatttaaccatcctccacattgtgcctgtaaacgattttcacagtcatttaaacaatcttgcaattttttagaataattttcaatgcactttatatatgcgtccatagcagctggttgtacccatgacatatctggacattgtcttcccaatatgtcaaatgtattggtggattatttctgacaaaccaatataaattgttagttttttcttcttcggcaggatccctactaatccacctgccattttggggattataataacggtaattgtagtaaaccagccccagttcgtcatcagcgtattcgctggagaaccggaacggattgtcctctgcggcattcccttccatcctgacaatattcccatacgggccgtattcgtacaaggcgcggcgtcccgctcggatgccgaagagcgccgtggtgtttttcaacaggtcgtgcgtgtagtacaggttttccgcccaggttcccgtctcatcaaagaggctcatggccaggatgcgcgtggctgccggttccagcggatcccacagataggtttttcgcagcacgggcatcgctgattccgtcgcggcggcggcgtccagttccgcgatttgcaggtagccgtgatagatgaaccgtttcttcgacatcaggatctctccttcatagacggctttctcaatccgtctgttcagatagtcgtagcggcactccacccgcctgttcccctgaatgaaccttgccgcctggttcagggcattataagagacttcccattcccccatggatgtttgaatctttgtctggttgccgtcggagtcataggcaggcgtaaaagacgctccttcctcccgggtgatggccgtgtactggttcaggttattggccgtgtacgcctccgctgacgcgcccgaaccttcccgagaggtgacgcggttgccgatgttgtcatacgcataggcgtatgtccctccccggctcatcgcgtcggcggccagttcgccgcggccgttgtaactgtagctgtgcgtcaggccgggagcgggggtattgaagtagtccttcttttccgtgggccttcccagcgcgtcgtaggcatagtcgtttttggccggataattggcactgccgggacgcagatagtcgattccggtcagcagattccgtttttcttcccgggtgtaccatctccggagggtattggggtagtcgagcgtttccagcagtccgttgacggcgtggtagccatagacgaagggatcgacgccgttattgagcgagaccgtagaaagacgtccgcagccgtcatattcccaggccgtctgctggacaataccctctccataatgcagactgtagcccgaaggccgccccaaaccgtcgcgcaaatagttgagcgcgcttgccgccagtcctgccgtagtttccgattccgcttcattatattggttgtaagccaacgtccttgttccggaatcatccgcaacctgagtgagcaggttcaggtggttgcagacataattgagtgaaggagtcgcatcattgtgcatgacggagaccaggttgcccgtctgcggatcataggcataagaagttgccagaggcgttccctgcccgtccaccgtccgggcctgtcgtttaaccgccagcctgttccagtcatcgtaagagtagctttccccatggccgtcggcataggttttagccgtcatcaggccggaggcgtcgtcgtagccccacgtcgtcatgtccccgtccgtccgttcccgcggatcggcagcgatggtttcccccggaacgcggaacgtcatgagggataccagcctgtccgcatcatcgtacgcaaagacggagggctggagggccgtaccgtattcggcggttttgcgtcctcgcaggtcataagcgtagcaggccgtgttgcccaaagcatccgtgacgcaggagggagaagccgtggacgggtcatactggatggtggtcgtattgctggctgcatccgtcctggctgtttcacggccggcgatgtcaaagacggtaacggcggcattgccgcgggcgtccgtataagtctccgtgttgccgctggccgtataaacgcgggaagaggcggtcagaatacccgcatggtctttccgggatacggtgtacccgtctatgacgacagtttccgcaatgacggaagaagccggggactgcgtttttaccgtccgtctggccggagccgtgtattccgtccattgcagggtttcattaccccgcggatcggtggagatgttttttccggccagcgaggaggacaggaaagaaaccagctcggccgtgctttccgcatatgttgttccctggctgttacagcgcgtgactgtggttacccggtacacgccgtcttcccgttgcaagcgggcataggcgtactccgtgacgagggagttggcgggagtggggttctcggccagcttgagcgtggttttgacgatattgccaaacgagtcatagtcataaagcaaaggagccattccatccacctgctgccgcaaaagcctgttgttcaaatcaaaaacgcgccggtcatgaacaaggcctccgttggcgttcgcccgggagacgcgcaccatgttgccccttccgtccgtgacggtttgttccaccagctccggttctccctccgcccggggaagaagcgtggagcgaaccacgccttctgcggagtattccgtacggtagaggagatgcctatgccccgtgccgctttgttccagcacggttccgtccgcatggcggatagtgacgagcgtcgctcccgtcggcgtggtgacggtttccgtcaggccgtccgcactgtaggcacgcgtactgctccttcctaagacgtccgtttcctgcaccagctgccccagcagatcgtaaaccttgctttccgtcgtcgtcatggggccgacgtcccggcgcgtttgcaggattctgccgaaggcgtcccgcttgtagctgacgatggtttcaggagtgacgaccgtttctccgtccgcgacttccgaccggctgacttccaccagctggcgcgccgtattataggagtaggtggtcatgatgccgtcttcatccttttcccacaaggggccgcagcacatcatctcccgttccgtcactctgccgttgccgcgcgtacgcttaatccaccggttttccctgtcgtattcgtaatccgccgtatccgtcagcgcccaggttccatccgtcagcaaggcgtatttctcaatgcgcgtgttatttccctgagcggaaacgtacgtgactttcctcgtgctgtgccccggcacggcctgccccgctatctgcgtttccctggtctccctgtagagggcgccgtactggctggccgcttcatagccatagaccgtctgcacgccgctggcggactgcttcatcttcagcctcccccgggcgtattcgttgggctccgcttacagccacgtttccgtcacttccagctgttctccctccgcccccaacgccgtggtgcgtttttccacacggcgcacatggttggcttccgtataggtgtaatgtgtatccgccagccgtgcggcgttcatagtgagcaccacgtactggtgcgcaatatccggatcggcatggtcggagcagcggtaataggtgtaggtgcccttccttcccccgcccgcccagggttccatccggacggtttcacgcccgaaggcgtcgtaggaccaggtcttctcgcttccgtcgggagccgtctcccggatcagtttgcccacggcgttataagcgtaagtcgtttcacgggcatagtcggttccataagcctcaatacggctggtgcacaggttgccgctgcggccctgtttataggtttcgcacacccgggaaataggagtgccgttttccccgcgctgcacggtagtgaagagtttccaaatccccgaagaaacctcctgcctttcacggatcgtgaaaatagagtcttccccttccccctgggacatgcaccaggcccctcccgtcccctgccagtagcgggtgacgtaaggcgcgcgcccttccgcctgctccgtgacggtgagcttgccggtctccgtattgccctcaatggtaaaggttttaaaaggcgtccccgtaacggcgtaaagaccggtggagacgtttttggcccccacctgctcgggcagataaaaggcgatcacatagcccgtatccgtcacgttttcaatattggccagaccgtcccacaggttccagacctggcggatgacatcatccgcgcttcggacgatgtccaggtaattggcaaaatcctgagccgtccaagaagaacccagcttggtccggtagccggaggccgcacccaaagcggaaacggaagaaccgccgtagatgactgtattgcccctggcgttgctgaccctcatttccgccgcactggcggaagccgaaacggcacgcccctctgccgcggcatacgccatggaaacggaacccgtccttttccgcgagccgccgatggagcctgcactggccgcgccggcatagcagtaatagttggcgcgggtgcctccgttccggatctggaatgccatgtcagcccccagctcccgaccggaagggggcagaatacagctggccatgggatgcaggtattgcagggctgcgggcgtccacaacctggaagagaagttataagccacgatctccagcatcccgtacggcacgccttccataccgcggaaggaaccgaagctggtgcgccagaccatgctggttttccgcgtctgggcagtcacccgtttgcctgcggaagagaactttccataggcggaggcggaggaaaccaggctgcgcacggcagacgcgccgggggaaccgccccggttgtccatgcagtcatccggggaaaagggattgtccggatcaatctcatccttatctccgccgttgtcgccattcgggcacggattgctggaactgctgttgggagaactgctgcttccactgctggagcctccgcatggatcatcatcgccctcgtcgttgttgtccactggctccgtttccgtctccgggggcacataggaagaagaagaacccgtttgccggttggtaatttccaccttcaggtcaaaggtgaatttggcaatgttgttattggcattgggaatggaaatattgctatagtccacatgtgcccgatgcattccgggctcaatgctgaaagaagccgtctgcggctcgtagctgccgcctccgtactgtccgcgcgggccgatgtccagccgttcttctccatccacggtcaagttagccagatcgtcggcgcccatggtcaccttgcattcggccgtttcatcaggccccagctccctgacttcaaaatcccagtcccagcttctttcaaaagcgtccgttggcgcttgttcgtcgatcgcggagggagctccgctattggaattgctcatgcccgttagggaattgacatcgttatcaaaggattgttctttcatggtttgaatcggattagctattgaaacgcaaacattgcatcatcccaatcttggaaaaactgcaataatttttatccgttccttatccataacaacaaaacctcctgtttcaacacgtccaacacgggatgccccctggccttagccgtgttcaatatatggtaacatttcttctctgcgcacttccgaatggaaaactctggcccatatggaaaattccggaagcagcatatccaaatggcctttaactgcacgccatgaaacacagcaatttttcatttaacatgaattcattaaatcttcaacagaaaaagcatgatctccctgaattgaaaaagaaatccaaaatccataaaaacggctatcgccttcgggcatgttcagcatccctgacatatccgaacggaaagaaagcaggataaactacccccagccgagcatccattcctgaattttacaaggaaagctgctccttcaaacgctccagcagattgccgcaaccgtcctgcagcaattttaccacatgctcaaagccttcctgccccccataatagggatccggtacttcttcatccggaaaacgagtcgtgaaaaaacacatgggcactattttgcctgtccattgtccctttttatctaaccgtttcaaatcccgcagattttcacggtccattcccacaatcaggtcaaattgttccaaatcctctttccgtacggggcgcgacttaagtcccggatcctcatatccgtatttttccagcgccgtcagcatccggctatccgggggacagccccgatggtaaccgatcattccggcggaatcgctctcaaccaaatgttccaaaccttgttctgcgaccatttttttgaaaatgatttcagcggcaggagagcggcagatgttgcccagacagacaaacaggactcggtaaggttcgggagcattcatggacgtcatttctttttcaggataggcaggcggcagccccatttcaagagggaagagtttatgcatgggaaacggaaacgcccacgaatattgcatggggcagagaaaggaactgtgccgctcattcaaaaataagattctcctgtgtttcggcttgcgtcagaggatgtccggctgtagattatcgcatggcagatttccctcttggattaagttttgatgacgtgctcctgctgccccgcctgagcgcgattcttcccggcgatgcggacatcagttcccagcttgttcccggctttgacatgaaaatccccgtgttgtccgcggccatggataccgtttccgaatcggaactggcgattgccctggcgcgggaaggcggcctggccgtcatccaccgcaacaaccccattgacatccaggcggccatggtttcccgcgtgaagcgttttgaaaacgcggtcatcccgaaccccgtcacggtcaacaaggacatgacgctggaagaagtccaccagatcatgatggatcaaggttactccggcttccccgtcgtggatgccaaccgcaagctggaaggcatcatcaccggccgcgacatgcgcggcgtggacgattaccagaatgtccgggtcaaggacgtaatgactcccctttcccgcctgattacggcagctcccatcacgaccattgaggaagcgcgccacatcctttacacccatcgcattgaaaagcttcctttggtggatgaacacggcgtgctggccggccttatcacggaaacggatatccagaagcgcgccatgtttgcagacgcttccaaggatgaacacggccacctgcgctgcggcgccgccgtgggtgtcggccccgattatctggaccgagccaaagccctgatttccgccggagcggacgccctgttcattgacgccgccacaggacacacgacccgcgtgatggacgtggtttccaacctccgcaagctgacggaccgtcccatcgtggccggcaacgtggttacggcggaaggggcagccgatctcatcaaggcgggcgtgcaggccatcaaggtgggcgtgggccccggctccatttgcactacccgtgtcatctccggcgtgggcatgccccaattcaccgccattcaggaggtagcctccgtggcgcgccccgcgggcgtcaccgtcattgcggacggcggcattcgctattccggagacattgtcaaagccctggccgcaggcgccgacctggtaatgctgggcggactgctggcaggtacggaagaaagccccggcaaggtggttcattaccagggccgccacttcaagcagtatcgcggcatgggctccctgggcgccatgcgccgcggctccggcgaccgctacggtcagaacagctccggcaagctcgttgcggaaggcgtggaagcgcgcgttccgtataaaggcatgctggcggacgtggtattccagctcatgggcggcctgcgctccggcatgggttatctgggcgcgcacaatctggaggaactccggaacaaggcccggttcgttcaaatcacctccggcgggctgaaggaaagccatccccacgatatcaccatcacggaagaacccgtcaattattcctgttaactcctccctcacatggacgacaagcacctcgtagccgtcattgacttcggctcccaatacacccagctcatcgtacgccgcgtgcgcgaactgggctacatggccaagctgtatgcgctggaagacctggaccagattcacgaacccggcgccgtcatcctttccggcggccccaaaagcaccacggatgcggacgccccggacattgactttgaatggctccaaagcctgaatgtccccgtcctgggcgtgtgctacggcatgcagctgctgaacatcaagcacggcggcaccgtaaaagccagcaacaagcgggaatacggccccgccgccctgctgccggaaacctgcgcgggcctgtaccgggacatgtccccttcctcccaggtatggatgagccattcggacacggtggaccatctggcggaaggctgccgcgtaatcgcccgcaatgcggaaggcgtccctgtctccctccaatggggagaaaccaccttcggcatccaattccatccggaagtgacccattcccatgaagggcgcaccatcctgcgcaacttcctttcctgtgcggccaatcttaaaaagttcgacatcggagactttaaaagggaactcatccgggaaatccgggaacgcgtaggcaacaggcaggtggtctgcggcgtctccggcggcgtggacagcaccgttctggccgttctgttgcatgaagcgggcgtgaacatgcgcgccatctttgtggataacggtctgctccgcaaaaacgaggcagaggaagtgcgggccaatttcgcccgtatgaacgtggaaattgaaacggtggatgcctccgaacgcttcctggcggctctggacggagaaagcgatccggaaaagaaacgccgcatcatcggaggcctgttcatcgacgttttctgggatgccgtgggagacgcggaaatgctcgcccagggcaccctgtacccggacgtgatcgaaagcgcctccaacgccaaatccaaggcctccgtcatcaagacccaccacaatcgcgtggaacgcgtgctggaactccaggcgcaggggaaagtactggaacccttggcggaactgttcaaggacgaggtgcgggaactgggcgcctccatgggcatcccgcatgacattctgtggcgccaccccttccccggccccggcctggccgtgcgctgccccggcgtagtcaccaaagaacgcctggacatcatccgggaatgcgatgccattttcatcggcaatctgaaaaaatacggctggtacgacaaagtctggcaggcctatgccggcctcatccccgtaaaaacggtgggagtgaagggggacgaacgctcctatgaatgggctaccaacctgcgcgccatcgtgtcggaagacgccatgacggcggactgggtggaactccccccggccctgctgagggaaaccagcaaccgcatcctcaatgaagtaaagggtatcaaccgcgccctttacgacatttccaccaagcccccggcttccattgagtgggagtaaagcttccgcaccctgttgacggccgttcagcagggtgcctcctctccggtaacaaaaatcaagaaaggagaaaataatgactgaactggaaaaatgcatggcgggcgaatggtacgactgccatgacaaggtgtttctggaattcaaaaacaagacgcaccggctcctgatgaaatacaattccctgccttacgaccataaggaggaaaagcgccaggtgcttaaggaaatgctgggcagcgtcggcaccaaggtctccatcggtcattccttcatctgcgattacggccgcaacatccatatcgggaacaacgtcaccgtcaatacgggctgcacgttcgtggactgcaacaggatcaccatcggcaacaatgtgttgatcgcccccaacgtacagatttacaccgctacacaccccattgagctgaatgaacgcctcactcccgtggaaacggatgaaggaatcgaatacatccgccatacctacgctcttcccgtaacgatagaagacggttgctggattggcggcggcgtcattatcctgcccggcattaccatcggaaaaggaagcgtcatcggagcaagcagcgtggtcaccaaaaatattcctcccgacagcctggcggcggggaacccctgcaaggttattcgtaaaatcaacggaagtcgggaacaatgatcaagctgatcgcttttgatctggacggaaccattggggacacggtccccatgtgcatcagggcatttgaaaaagcagtttctccctatgccggacacacgctgagcgaacgggaaatcacgcagactttcggcctgaatgaagtaggaatgatcaagaaagtcgctggagaaaaatggcgggaagctctccatgaattctacccggtttatgaagaaatgcatcaatcatgcccggctccgtatgaaggtatacgtgaattgataaaaaccctgcaaaaggctggcgtgcttgtcgccctgattaccgggaagggagacaaaagctgccgcatcacgcttgagcaattcggcatgcggaatttgttctgttccatcaagaccggaacggaagacaaaccaaacaaggcggaagccattgaagaacttctgcatgacttccgcttgaacaaagatgaattttactatatcggggatgcggtttcagatgtgaccgcctgcaacaaagcgggggtgacctgcctgtctgctgcctgggcaacgaccgcagatgtcagcggattgaaaaaagccaacccctcaaaggtttttcccagcataaaggaattgacattattcctgtccattgagaaataattaggaggtcttttccgactaataaaaacattatgaaatttcataggatagttgttctcattgatgctgataataccaatctagctaatcttgaaaaactcatacaatacatatccactcgtggacgtattgtggtcaaaagagcttacggtaattggagtgaaaatttaaaggataagaaatctgcactacaacagtctggttttaaaacagagcattatttcaattgtgttcccggaaaaaatgcaacagatatagcattatctatcgacgccgtagatttattacataaaaattcttacgactcctttgttattgtttcaagtgatagtgattttacacctctttctatctaccttaaagaatcaggagtttatgtaataggatttggaaaaagcgatgcttctgaagcttttaaaaacggctgtgatgaatttaaagatatagaaaaaattcctactagtgaatcaaattctcaacatttgaagaataccgccccgcctgcaacaaaaaaagatcctttagagatgatccataaacatcttcaacaatgtgcggtagataataagaaagacgatgggtacacatctgcaagcgatgctggtaaatatcttcgacagcacatccctgattttaatccaaaaacctatggatacaagaatcttactaatcttttagaagactttcgcaatctctatgctattgaaaaacatccaattcccggtaataaaaactctgttaatgttagctataaactctgcaactctacaaacaattcagaatcctgatttaatccgtatctgattccttccatggataccggcgccgtcatcctcacctcctttctctccaccattcccgtttatcttttctttgctacgggtttctatctgcgccacaagcaagtcatccaggcagaccacgacgcgcccatcatgcgcatcgcgatggatgtggcctatccctgcctcgtcttccacagtatcatgaagtacatggtgctctccggaaatgagacgctcagcagcgtttccttttccctccaggccatttcagccggggccctggaacttctgctgggcatcgcggctgcatggctggtcgctaaactgctgcgcatgcgcatcggtacgggcctgcgtacgttcaccctgacggcgggagtgcagaactacgcttttttcgtcattcccatcatccagatgctgtttaccgcaagcaacgaccccacgctgggcgtccttttcgtccacaatgtagggtgtgaactggtcgtctggagcatcggcgttatcattatcgcaggcggtccgggcaacctgaacatgggcgtctttttccgcgggcccctgctggccgtcatcgtgggtctggcgctcgcctggtccggcttgggaacctatgtggcccaaccgcccctgatgaagacttttgaaatgatcggcaactgcgccacgcccctgtgcctgatcctgttcggatgttccatgcgggatttatggcataacatgaagtgggaacccaaacccatcatctgcgggctgctgacgcggctggggctggcccctgcactgctgctcctgatggcttatttccttccggtggatgattatatcaagcgcgtcatcatcatccaggcagccattccctccgccgtcattccggtcattctggccaaacgtttcggaggtcatccagacctgggcactcaaatcctgctgacaacgacggtggcttccttcctcacactgccctgctggctggctcttggttccaccctggtcgtaccattgtattaacgggataataatccccggatgacctggaacggcccgcttgcccgacatcttccgcttttccggaggattccattcccggtgtcctgccccttgatggaaataaaaccagtctgcaaggttcggcggcggaacaatttccctgctgaaatatccgcatcctttccgtctccatactgcattccatgctgaatgcttccctacctttgggttgactccccagtcggatatgtattgaatggattcatgaaatttcctgctcctctctgcgccgccctgctgccggtcctgttttcctgcgcggagcaggtttcccggattgaacacgttcgggaggtgcccttaaaaaccacggtggttcctgcggaagacgtaggcatgcaccgcacccaggccacctatctgctgcatggcgccgtctcccagcaacagcgccttcagcgtctgggtcaatactacttcgtcacatggaacgatgccaatccggaacaggcggcaaccctggtcatgatgtaccgccaaggaaagacaggttcaaccgtcctgacaaaatccatttcctatccagccgggagaaaaggcggcacgcaaaactccgttttcagattcatcggggatgaggccagagaaaaaggggaagtcctcgcatggaagctcgtcctgaaggacaaccgcggcaaaacgatttccgaacgccattcttatctgtggggggacgatcattgactcttcggcaaaaacaccgaagagccgtaaaatcacccggatatacaggatgagacctgcagtttccggcagtctcgccagcctccaactccgttaataatcctccggaatatgggcacgcttacgcttcctgccgtttggcacggcgtttgcggacagcgtcggcaagggtttccagcacttccactgtcgtctcccacccaatgcactggtccgtgatgctcttgccgtacaccaggtcggaactcaacggctgggctccttccacaatgttgctttcaatcatcacggcaacaacctgttcggacccgctggatatctgttccgcgatattggcggccacagcttactgtttgcgataatccttgcaactgtttccgtgggagcagtctatcatgatgcggttgttgatgccggccttctgcaaggcttcttccgcttcctttacatgatcttcatcaaaattcggccccagggaggaaccgcgcaggatcaggtggcaggacttattgcccgtagtggaaacaatggcggaaactccctgcttggtcacggaaaggaagcagtgcggacaagaggaggaaacaatggcgtctacagcgatttgcaggctgccgctggtgccattcttgaagcccacaggcatggaaagcccggaagccagttcacggtgtacctggctttccgtggtgcgcgcgccgatggctccccacgtgatcaggtccgcaatgtactgcggcgtgatggtatccaggaactcggtagctgcgggcactcccatatcccccaggcgcagcagcagcccgcgggccatatggaggccgcggttgatgtcaaaggtatggttcatgaacgggtcgttgatgaggcccttccagcccacggtggtgcggggcttttcaaaatacacgcgcataatgatcaccagatccttttcaaagcgcgccatttgttccttcaggcgggaggcatagtccacggcagcctggggatcatggatggagcacggccccaccaccaccagcaggcggtcgtcgtggccggaaatgatgttctccgcattcttgcgggtcgtagccaccattttggcgatttcggtggttgccggataatccttgattaaaatggcgggggaaatcaggggctcaatgtcttgaatgcgtatgtcgtctgttttgaaccagttcatgtctggggcttattgagaggtttttgagagaagttgaaaagaaaaaaatacggtttgcgggctttatgcctgaatataccgcggggcctcacggccataagccggaagccccgcaaaatgaagcggccgcgcctcccgacaagaggcgccgtcatgcattaccaggaagtcacattgtcttccgtcaattccggattgttgatatggccgtccgccgtgctgccctgcttgtccttgccggtgctgtaaacggccacgttcttggtcaccatccgggaacctacctgaacacggggagtacggtcgtcagggttggcattcaaaatgatgtaatagggagattcccaaggatccatcaggcccacacggccgcggctttcaaaaaacaggccgggagcgccttccacatccgtagtcgtcgtattgaaataagccgttttcttgggattcagctttctgtcctcatccgcccggtccatataattggtcaggatgctcatgatgcggctatcgtcgtccacggcggttgtcacgtaatactgtccgtccttgtgggcctgcttggtcatttcccggctgctccaggccacgggaacacggccgttgtccagcatgtaattttccacagccgtctgcagaccgttgcagtcgctccgcgccgtggtaaccttggatttttccatcacgccgttcaccaccgtcatggcgatgccggccagcgtcaggataatggcaatcaccacaagcaattcaatcaacgtgaatcccttggacttacggttcaaaaaaggtgtcttcatactttgccaagagtagcgcaattacagttcagggcaagcggaaaacaaccggcgccgcctatttcaaagcctgttcccggaatggcagcagacggaataaccccggtgcacaaacaccccggcgccttccggcagccggggtgtttaaaaagaatgctcctttagttggaggggacaggggtttctgcggaagcaggggccggagcttcgggcacggagggagccggagcctgagaagaagcggctttcgcctcagcggcgcgcctgcgcagctcctcctgctggagttcttccggcgtcttggcgggaatggaagcttcctgcctggcggcagccttcatcatttccgggctcaacaggctttccgaactcttaacgtgctgccggttgatcagcatgcccagccccaggcaaagaaccatgaacgcggttccgaagtacaccgtggcttttttaagcacatccgtcgtccgggcgccaaaggcctggtccgtaatggctgcgccaaaggcggctcccagcccttcctgcttgggcctctgcataagcactacgcccagaaggagaagtgatacaatcaccaaaacggcaaaaagcaactgaatgctgatattgagtgaatctgctaaaaaaaggttcatgagcgcggggagtatgtgtgaattcgaacggtttgtaaagtctaggaaatgatttcgttatgctcgttgcagacgattttcttggggatgatgggcttgtccgacaaggcaaaactcataatgaccacccgttcgcccgtcttgattaaatgggccgcaccgccgttcatgatgatgttccccgtgcaagcaggcccctggagagcatatgtttccagacggttcccggacgtgacggatgccacgagaactttttccccgggccacaaatccacggcggccatcaaatcggcaggaatttcaatactgccttcatattgaacatcgccacgggtaatcatggcgcgatgaatttttgattttaactgctcaaccaacatgacgttcgaacaacaaacccccgatcgcccctccggtcaagccgtcatcctccattttacggttttctgtgtcttactccccctcctccagcgcttccgcggcatgggcggcatcccgggcaagctggcttttcaattcttccaaagaggggaatttgatttccggccttagaaaacggaccggttccacttccatctcccgcccgtaaatattccccgggtggccgaataaatgcgtttccagcaaaagttcccccgtctcaccttccacggtggggcgcacccccagattggctacgcctccgtatttttcgccggccacctgggcacgcacggcgtaaacgccatggggaggctgtaacccgcaaccgggtcttatattggccgtggggtagtccagcaggcgccccagttggcgcccgtgaatcaccgggcccttccagcggtagggacggccaagcatgccagcagcctgtaaaaaatccgccgcgcgcacggcttcgcgaatccgggtgctgcttatgcgctccccgtcctgcagaatagaaggaacggccgtcacccggaacccgtagcggcaggacagcaggcgcagggtttctacattccctgccctgccgcggccaaaatgccagtcctctcccacggcaatctgagccacccggcaggaggaacaaagttccccaataaactcttccgggctcatggacgccagcctggaagaaaattccagcgacagcaccgccttcacccccagctcttccatcaaggcaaatttttcagcatcttcccccatgatggcgggcggcacgctttccggcctcacccgggccagcggatgggtgcggaatgtcagcacggcgggaattcctccgtcaagagcagcccctttcaccgccgcggcaatcactccggcatgtcccagatgcaccccgtcaaacatccccatggcccagtgtacgggggcggcaaggcttttcaattccttgaattcccggtaaatgaccatatgctacccggcaatcagaatatccgccagctccttcagggaaagcatggcccggaacagttcctccctgggcgcggttttcagggtgtccaccgtaatggcgcggtccaacgtaaaagaaccggacctggtgcgccggagggcgctcaaatgcgctccgcagcccaatgccttcccaatatcataagcataggaccgcacataaaaacctttggaacattgaacggtaaaatccacttccggaatggccacgcgtgaaattccgtggccaaacacttccacaggccgcggctcccgcacaatttcctgacctttccgggccagtttgtacagcggcaccccgtcctttttgatggcggaaaccatcggaggaatttgttcaaaagctccgtcaaaccggtcaaacgctccacgcacggcctgttccgtcactccgtctacggaatactccgccactatttctcccatggcatcctgagaggaagtctccacgcccagcataagggttccggcgtattccttgtgttcgcacatcaacttgtcctgaagcttggtcgccttccctaccaccagcatcagcaatcccgtagccatgggatccagcgtgccgcagtggcctattttcttaattcccagggaacggcgcgcaattgccaccacatcgtgggaagtcatgtcccgcgccttgtcaatcaacaggacgcccgaaggaacctggatggaatctgaaacattcatgaaatcttctgtcggagcacgcgttccacttcttcccgcatggccttcaggatagtaaggcgcacttcttcaataggcccccggatacgcactccggcggccatggaatggccgcctccgccgaaacgggaggccagctccgcgacggatatttcaggcgtcttggatctcagggaaatacggatgcggggattgtcctccgtttcttccagataagcggccagccagactccctgcacggaacgcagaaggtcaatcaggccttccgtatcttccggacggcttccaatccgggcttttgcctcattcgtcaggcaaaacgtgcaaatcctgccgtccggcgtcagcttcattccgttcagcgcctcacgcatcaactgcattttcacccacggcttttcctggtaaagctggcggttgatgtcctggacgtcaacgcccatccggatcaaatccgcagccagttccatgacggccgccgtcgtcatctggtactggaaagaccctgtatccgtgctgacggccacgtaaagggcgtctcgcatcaccggagtgacgggaacgcccagatacttgaaaaagtaatataaaaccgcccccgtggcgcattcgtccggcaaaacgcactgaacgtctccaaacagctcgttcgtccgatggtggtcgatgttcgcccacaccttcactcccgccaaagcctccaggctgcgttctcccagcctcttgagcgcgccgttatccacggaaatggctacttccacatccaccggctcatcaggcgtgggaataatattttccacacccggcataaaggccagattggaaggcaccccgtcctcgttcatcatcaccaccttctttcccatttgcttcagggcttcccccaaagccagcgtggagccgatagcgtcgccgtccgggtgaacatgcgcaattaccgcaaaactgccgtggctgcggatcagatccgccaaaggcgcgaattggggacaatgtttccaatcttccatatgcactgccgtgtttttatagaaaaagccgcacctggacaatcaccaagtgcggcttgaaaagtcgtacttaatcccggaagaggattacttcttggacttcatgaccaccggagccacatccacggcgggctggttcaggtcattgaacttgggcaggggggtcaggggcggagcaccctgatcctggcagcagcaggaagccatgatgctcgccgcaaaagcggcaagagccataacggtaatcttcttcatatgcgtggttaaatgatgggtgataaaggatatggaaatatcttggagcataaaagcataccatgcgggcgcccgtcaatcaaatttgcgaaaatctcccaaggagacgcctttcccaaaatggcaagacgcataaatcgctcgcccggggttatctgtaattataatctctgccaagctgtattcttttcatgcccttttccgtcaaaatactccggtttttcggcattctcctgctgagcctctgcgcgctcggcgtggcaagcatgacctgggcgtacctggtagaacccaatcttctgtttgtcaggaaagtggacttccgtgtcccccagtggaaagggaagggaacacccgttaaagtcgttattgctggcgatttgcacctgatgcccaccgcgtttgatgaagtgagggccctgcgctatgttcagaggatcatgcggctccagccggacctgattctgctggttggagactatgcccggggaagcagcgaaaacgccagcatggatcccgccacggccgcccggctgctgaaaggcctgacggctccctgcggggtcttcgctatccagggaaaccatgatttcaccttcggctggaacaactggagcagggaactgaaacaggcgggaatcaccgtgctggaagaccagagctctcttgtcacgttcaaggacggaaggcagctccagctttccggaatattggatacgacgcgcaatgtcagaaaacggctgcccaaacgccagtcgccggacatcccccatttcctgctttcccaccgtccggaaacggaccacatactttcccatggagacgtggacatcgtcatcagcgggcacacccacgggggccaggtttgccttcctttcggcctcctgcggtttgaagccagcccggaccatgccctaccctacacctatccctggcatatctccggcggcaatacctacctgatcaccaaggggctggggacaagcacactccccctccgcttcaactgcccgccggaaatctatctgctggaactgcattgacccattcctcccgttaaaaatgcagtcccttccttcccggttccctccccctccgctccacgctcgcggcaatccataaggaaaacggaaaagaacggccgggttccatagtttcaaaggagccggttatcaaacccttccttcagccttaaaatctttctggccgtcatccggtaaacaggccggtaaaggtgctttttcaagacggccgggagcgttcttccgggcagcggaccgcgcagcagcccggcttcacgcataacccgttcgtaacgttccccttcataacgccaattataccgccagggcttgtgcactccctggtaatgaagaatgcccggttccaaagccgcttccaccgcctggcgcggcgtgacgccgcgccagaactgttcccggggatcgtttttcaaaatgcggcgcgtcaagccgtcatgccagttccagcgcgggtgcagcggcacagtcagctcgcacagggctccgttcaaggcatcctggtccggacacgtcagcctgtcccggtgagtgacggcataatccagcacagccctgaccagattcctctcccggaaaacatccacattcatcagcagcacgccggaattgaaatatcccgtgcaggtcagcggcatctcaagacgttcgttaaaatgggaaccgggtctggaaaaattctcaaacaccacccctactgcttttccgtccatattcgtccggaacagttccgtcaaatcccggcaaaccagaacgtcaatgtccagatacagaatattgccccgctcttccttcaataattccggaatgaacacgcgtccccaggctggcaccggccattgttccgtatgggggaagtcgtgctcttccagaatgccggaaacgtctatgaactccagacggcaatcgaacggagcggccagccgctccacgctcgcccggttctctccgtcaatgccgtcggaaagaacgtaaattttgtaaaaagtctccggaccggcagtattcagcaaagaaaagacagtaacgctcaaaggcagaatgcccctgttgtcactggccaggacgacggcaaattcattctttttcatcggattatccattcgggtgatgtcagcggcgcagcaaccgggctcccgccttgcgcattttcttccagtaataggaaaagtccaagccggattttccgcccatccaagctttcagcaattttccttcccggcgggacaggcaggcatcatcctctgcgggacggtacagattttcctcacggagcatatcggccacctttcgggtaacctccttttggacggcatgaggggcatatttgcggatgttcctcacgcccattaccagcattttcaaaaatgccgtcctgtattcctcaagaatcccggcttctttccattccttcagcaccagctccgccaccgtcaggtaatccagcgactggagggaactgccggacgcaaaaccgctggtaatggatccggcccgcttgcggtaaacgtaagccgccctgctgacgacgcaaaccctcctgcaccatggaaaaacggcgtaatggaaatacaggtcttcacaggcaacgccctcggggaaccggatgccatgcttttccacaatggaacgcctgatcatcatgccgcccgctccatgatgtattttcccaatggtctccggagtgcagggaagccaccctttttccggaggggccatgtcctccggcagaaaccggtcctcccggtccggggcggactcgtaataataccggaacccgcatgccagcctgtcggcatccagcgccttcgcacggcggtacatctcctccagcaaatccgtttccagccagtcgtcggaatccaccagaaacagatattctcccacagcatggctcatcgccagattccgggagcgggataggccgccgttttccggagcctgcacgaccttcacccgcgggtcccgctccgcgaattcccgcagaatggacagggaaccgtccgtggaagcgtcatccacgcaaactatttccagctcacggagcgtctgtgagcaaatgctttccaggcactgggccaggtacggctccacattgtaaaccggaaccagcacggaaatgttcacgggagccgtcatgagccatgcggagaatctgccgcccttatttgttcaaatccttcctgcggcggcagaaagggctccagcgcggaccatacctggtccactgtaatttcctcaatggcgccgggggaaaccaggttggaaatgcaccgggcagtaatggcggaattgcgcgtccggtggcagaaaatggcggtcacgggcaccccggcataggcacacatatgtgtaggccccgtatcattgcctacacaagccagggaacgcaaagccatctggggaatatccatcagggaagacttgcccagaaaactgacagccaggggagagctggcggcaatggcctccacttccgcagcctccgcccgggtgccgatgacaacggaggacacgccccgcgccgccaggcgtttcgccagggcgcagaaattctccacgggccagcgcttgtagggatggttgggggaacagcccggaatcatcatcacatagcgttccggaagctcgtcaaaatgcagcccctccccgtgcatgaaagaaagatccgtcaggacgcgttccaaacggaacggctcccgttccacctccccccaccggaaggctttctttttcagcaatttgcgccgttctccggaattgcaggccacccagtccatgtcatggttcagcaggaagcgcacggcgggataatagcgtttcctggtgcgggaagattcctgaagatcgtacaccacgtcaaaattccctttcacaatggaacggacggccctccaggtggcgcccagcttccagtaaggcaggcgattatccacaataaaatcgtcaaacactccgagctgctccgccatgggaacaaacattcccatggtcatcagggtgatatgcgcctccggatgaagttcgcggagccgcttcatcgtccccatggcgagcaccacatcgccaagggctccatgcttgatgatcagaatgcgctgtacgggcatgggagaaaaaaggaatacgggttaaacgtaactgtcttccctgtccagatactcctgcacgtaccggcgcacgccatcctccagggaagtcatgggcgctgcgtaaccggcagcgcgcagcctggaaaggtccgcctgcgtataatactgatatttccccctgagctcttcaggcatctcccggtaggcaatcttttcctggaggcccagcgcatggaaggccgccttcgccagatcgtggaaagagcgtgccttcccggaacctacgttgaacaggccgctcacctccggatgctccagcagccaaagcaccacgtccacgcagtcgcccacccacacgaaatcccggagctgccatccgtcacggtaatcgggatggtaagatttgaacagcttcaccgtttcattggccttcacttgggggaatatatgggccaccacgcttttctgcccgcccttatggtattcattagggccgtacacgttgaaaaatttaagcccggcgtattgggggggaaccggacgcccttcttttacttcccgggccactttacggtcaaacagggccttgctccagccgtatgcgttcagggggcgcagcgcgttgacgtgctccagggaggcgtcatcgtcaaaccccatggaaccgtccccgtacgtggctgcggaggaggcgtaaataaaccgtttgccgtacagggaacaaaactcccacaaatgccagctcagcgtgaaattcgtccggataatcaaatcggcgtccgtctccgtggtggcggaaatggcccccatgtgaatgaccgcctccacctcatccgcatgcgccttcatataatcaagcatgccttccggagaaaccacggcgcacagctctctcttggcaatgttcctccacttgtcggaagagcccagctcgtccaccaccacaagatcctttttaccggctttttccagagcggcgacaatgtttgagccgataaacccggccccacccgtgacaataatcataagaaaagaatcaataaaaaagttgtacggccttttgtaccacatccacccgtccctaggcaactgccatttgaggcgttccccggctcccaattttcaacgaatttacaatccggacactccaaaccctgaccgttccatgcggaaaaccattgggccgcaatccccgcgcagcctgcggaggatgcgcccctcaaatcctcttttcatactggcaacgttaaaaaaattcggtaagacctgtcttgcaaaaattatcattgaccacggattgtaaatccgttacacacattcccacccctatgatccccgatgtttccatcattgttccctgctacaatgtagccgcttacgtggacagctgcctggagagtctggtacgccagactctccggaacattgaaattatctgcatcaatgacggctccacggatgagacctggacacatctgctgcgctggaaagaaaaggacagcagaatcatccttctgaaccagtggaacgcgggcgtctccgcagcaaggaatgcagggctggatgccgcccgcggcctttatgtcggttttgcggatccggacgactacatggatccggaaatgtattcccgccttttttcggcggctctggaatatgatgcagacatcgtggaatgcggcaaccatgtttttgaagactcgtcagaccggcttatcgaagccaaaagaagatcaccctcccggcattttgaagagaacgcctctccggacagcttcttccgggattccatctgggggaaaatggatatctgcgtgtggagcaaactgttccggaaaagcatgctggacgcccaccgcctccgcttcaacgtacatctgaaatccggcgcggaggatgaaaccttccggctgatggccgttccccatgcctcccgtctcctgttcattcctgactgcctgtattactaccgccttatgcgcaacggctccctctcccgccgctgcaacgttcccacctactccaaatgcgtgcaggaattccagcggctgctgtacattgtggactactggcagaaacaaggatggcagaatgaaggcctgttcgcttacggcgtccggaaaatcaggcctttttttgtttccaagcatccccttttccatcagatgaccgctgtccagcaacgttccgcgctggactggtggagcctgttctatcagaaggcggaaggaaaacgtttcctctccgctttatcgggacgggacaggcaactggcggacctgttgaactcggcggaaccggcccccaacggctgggggcgcattctgctggcagcctgctccctgcttcccggacaaaaaggacgttattactcctgcaaaaaaatgcttgcggaacatttttcccaagtctgccccaatgggtttcaaaaagaaaaagcttctctggaagagccgtttgacacatcgccgccttccctgtaaattgccttatcctcccattccggatcaatgaaccgttttctctcatttgcagactcccgcatgtcggccgccctggagcggctgggcaggcaggcggaagcgctggatttttttgatgagatcacgctcttcacggaacacgacctttccgcagaattcaccagccgcatgggccgctacctgacgccgtcctgccggggattcggatactggtcctggaaaccctgggccatccaccatgtcctccaagaaatggaggaaggcgaccgcctcctttatctggatgcaggctgccatatcaacgccaacggaacggagcgcttccgggaatacgtaaatatgctagaccgcgacagctgcggcatgctggttttcaccaacggacagccggaatacaaatggaccaaaggagatatcttccgccacttcggcgtttcccaagaagacgggcatatcacgcatacccagcaaattgcgggcggccatgttttcctgaaaaaaaacccgctcacggaaagcctgatccgggattggctccatgtcttttacgaccatctgcatcttgcggacaacactccttccgcctcccccaacctgccgggttttgtggaaaaccggtatgaccagagcatcttttccatcctatgcaaactgaggggcatcaccaccctcgacggatcggaaacctatgcggaaaactgggaacagctctccttgtttccattccaggacagacgggacatgggaatcccacgggccgggaaaaagggatggctggaaaaatgcaggcagctccttctttcttctaaaagaaacggattaggaatccggtaaagcttccccattcggaacaaccgggctgcatgacgtttccagacggggaaatctaacgctctacgaactgttttcccgtccttttccacagcttcatcccgaaaattcctttacccttcggctgccgtttccggaatgtaatgacggttatttggacaagctcttttcatttgatcaggaatgttttgccttcatgaaaacaaacatccctccattccaaaactccgcactcgcactatcctccgccgacattctcccacccctactcacagttatgccgtcaccggaatccggctttcccccattcataccggaatgaaaataaaaaggccatcatgctgggaacagactgccgcagttcatggaatactggcagcctggatttccccaaaacgtttttctttcagatttgtaggcttgacggcggattcctaatcctcatactttcctatgtggcttctcctcaatgccgaacaatatttcaagtctcccatagcgtctcggccagctccgccccttaccggttgagcgacgctctgaaccggcatattcccggcctgaaatccaccctgctgctccggaggcgcaaaggaattgacggcctggaaatccacaggacacccgccagaagggctacggacgccttgcgccgccatctggcccatggatttgacattctgctgccggaaagaagaaaagacctgcctttctccctgaatgtgctgggcatgggatttgacacggcccaaatggaaaaagccgatgtagtgcatctgcactggataggcggcagaaccgtggatttctcgcagctgtgccatatccgccgtccattggtctataccctgcacgacatgtttgcctgcaccgcgggatgtcactgcaccatggactgcggcctgttccaggacgaatgccgcggcaactgcccccagcttggcgctccccgcctcttccgcaacattccagcgtggctgttttcccgcaaacgccgcgccttcggccgcatcccgtcccttaccctcgtaactccctccctctggttaaaaagggaagtggaaagaagctgcatgttccctggaagaaaaatcgtacagatttacaatcccgtggacacggaccttttccgtccggcggaagaccggaatgccatccgggccggcctgggcatcccgcccggagcgttcgtcatcgcctgcggcgcaaccggcctgttcaatccggtcaaaggcggccatttcatccccctggtgctggaggaactataccggcgcgggcaccggaaccttcatctcctgctcttcggcaaccaggaaaaaagcgtggactaccccttccccagcacaagcgccggattcattacggatatgaacaagctggccgggctttacagcgcggcggacattttcctgaaccccacgcttcaggatgtcctttccaacgtagcgctggaatccatggcctgcaaaaccccttccgttaccttccggacgggaggagttccggaagcggttctggacggaaggacggggctggtcgctccgcagggggatctgaaccaaatggccgcccactgcgaacggctcatccaggacggaaaactcctgcaaaccctggcggaggaaggccgcttaaacgcggaacaaacattctcttaccccgtcattgccgcacggcacgccgccctgtatgaggaaacgctccgggaataccgttacgaagagtgaaaccggtcggcgttcaaccgccggactgcctgttccagcacatccgggcgcatcttcctttgtcattgacaagaaaaagacgcctcatacactctgcaccgtttcaacccttctctccccatgaaaacgcttaaaatctcctttttacagtccactccggatttcggcagggaaggaatgcttcagcttctgaaaagccggtatcatgtggtggaagacgattccgattttgattacctggtcgccaccccctggttttacgtcaaccgggaggctctttacgattttctggaacgggcccccggccacatcaccgtcatgtacggttgtcatgaagccattgcaccggattttatgctgtttgactattacatcgggctcgatacggtgcccggaagcgaccgtactgtcaaacttccctaccttcgccaccatttgcaggaagtgcacggcggtaaggaagacctggatgcccatgctctcctggcctccaaaacgggtttctgcaacttcatttacgccaaccgcaaatcccatcccaacagggatgccatgttccacaagctctccgctttccggttcgtcaattctctggggccccatcttaacaacaccccgggcgacggccatcgggcggaagactggtacgcatcctccatcagaatgaaaaagccgtataaattctccattgcctttgaaaatgcatggtaccccggctacactagtgaaaaaatcgtcaccagcatgcttgcgggcaccattcccatttactggggaaatccggacatcagccgggaattcaattccgcctcattcatcaactgccacgacttcccaaccctggacgacgccgcggcctatgtgaaaaaagtggacgaagacgacaacctgtggtgtgaaatcatgtcgcgcccctggaaaaccccggaacaggaagcccgctttctggaagagacggaaagggaaacggccaagctttacaaaatattcgaccaatctccggaagaagcgcgccgcaaaggtgacggaacatgggtatcctactaccagcgctttttaaaacgcggccacaggatgcagctggcatggcggcggctgaaaaaccgcctgcgccgctaaccaacgtttccgggcaattcaaccccatgccggatttcctctgtccgccttcccccgtccccatccacttccttccgcttcatgagcaaatgcttttctgaacccttttgttcaccttctccccaccaagccggaggcgccatccacggaacctatttcccgcacattgacggcctgcgtacttttgccgtgctggccgtcatcctgtaccatttgcaggaagggatctgccctggaggctatgcaggcgtggacatcttctttgtcatctccggatatctgattggcggtggactcatccgcagcctgaaggagggaacgttctccctgacctccttttacctccggagaatcaggcgcatcatgcccgcctacttctgcctgattgcggccgtgctggctttcggctgcgtcgttctggactgcgatgacctgcggactctgggccggacggtgagatccagcgcccttttcatcaccaacacttacttcagcagaaccacaggggattacttcagcccggcggcggaagaaaaccctttgctgaacctgtggtccctgagcgtggaagaacaattttacctgatgattcctcttaccctgtggctgctctggaaattcaggaaaaaagccgtcaaacccgttctatggggggcgctgggcctctccttcttcgccgccgccttccacatggggcatctggaacataacaaggccttctatctgctttactgccgcgcctgggaacttctggcaggctgccttctggctctggctcccgccgcggaacagaaccggggaaccggatggctgcggacggcgggatgggccggaatcctgctcccctttgcctgttatacctcttccactccttttcccggatacacggccatcccttccatcgcgggggcggccctgcttatccgttacggaaaccatggctggtccgggcgtatcctcaggcacccgctcagcacgggcatcggcaaaatctcctactccctctatttgtggcattggccagttatcgtgtactggacatacgtctgtttcgatgaatgctctccctgggattatgcgggcatgtttcttctctcccttcttctgggtttcctttcctggaaattcgtggaaacccccttcagaacgaccgtctcatggcaaactcccggaaaagcgtttctggccacggcagcagggtgcctcatgctgggatttgccggtgaatggctcaaatggacggacggcgcacgggattactggcatgtagcggccaacagcatggaattccctgaatactggaaagggccggccttcccgccctccttcggcatcacgcctcccagccgggcggtggtggaaaagggcaacgccattcagcaccatcatccggagctgggggatgtgacggattacccttttgtcctgctgggaaaaaacgggcaggccccttccttcctgcttatgggggacagccatgccatggccagttcccccggatttgacgaggccgcgcggcttcttcagcgatcgggcctgttctaccgcgcgcgcctgtgtccgctgagcggcatctccggctccggagactcctcttccctgacgctcctgcgcctgatgtacccccattgggaacacaatatggaactaattctggactggctggaaaataccccccaggtaaagaccgtattcatccacaaccgctggattgaactggtgaacaaccaccgggatacgcgcctgaaacaactggttgcagacggcctgcgccacacctgtgcgcgtcttcggaaagccggcaagcaaatcgtgctgctgggtcccgttcccgaatggactttcggcccgcgcaagctcatgcggcgcaatgccctgctgaacgccaaccggacagaccgcctgctgggcggggacttcaacacgcggcagcgtccggtattcgccctgttggagcacatggaatccacaggcctgtgccgcttcattcccctccacggcaccttccataaaaatgggcggtggctggcggaagacggcggccaattaatgtactgcgacgacaatcacctttctccctacgggtccagaaaaatggtcggcgacatcatcgaccagcttttcccgggaatggaaagaacagcggccaactgacggaagctccgcacgggaaaacatccaatcctttgacattgacaaggcatgcaggccccctacactggcgccaggcagcaaagccttcgcgatggtcccggataaaagcccggaatatgaaggccataccgcgcccccctcttcaacgcctgtactcccatgacggattcctcccgccccacacgcatcaaggtcatcagaaaatccatgaaggcctctccggatcaaacggaatccctgttgtggggcgactgcctgttctgcacggacgccgccatgacggattacgactgggttctggtatacgacgaatttcccagaactcccgtgggcaccatcagaaatgaaacggaaccccttctctgtcctccggaccagactatcctgattacggtggagcccccctccatcaaaatctacagcagggcatacaccagccaattcggcaccgttctcaccacccactccacccgggaccttccgcaccccgggcacaccttgggccgcggatgtcttgaatggctgtacatcaagcccatgcaggaaattctggaccagaaggaattcccgaagacaaaaatgctctccaccatctgctccgccaagcagcatacgcataccatgcataaaaagcgctatgatcttacgcgttacctggcggaccgtctgccggaactggactggttcggacacggcatccgggaaatagaaaataaaaccgtcgccatggatgactacaaatatcatctatgcgtggaaaaccatctggaaccccaccattggacggaaaaactgtctgatgcctttgtcgccatgacccttcccttttacgccggggatccgttggcaacggaatgcttcccgcaggaaagcttcatccccatcccgctggacaacccgcaaaaagcccttgaaatcatccgcaaggccatggaggacggagaatatgaaaaacggctccccgccatccgtgaggcaaggcgcctggtgctggaaaaatacaacatgttcgctcaaacagcggcagtcattcacaaccacagggaaacgggaaccatacgccccggagccatgctgaaaggacgccacgttctgcggaaaaatccgctccatgcccttcgggaattgacggacacgctggcctataaaatcaggtcgcgcggcaggcgcggaaccggaaccggagcataacctggattccgggcgccggcagcggggggggggggcaggccttccctgccagtaaagaaaatgggcgtccgatcttctgtcgatggccgcgcggctggaggaacggaaagcctccatgtgacggaaagattcaaaaggaacgctttccccggtacccaacctcctgcccattaaagcatgaacggctccgtcaaccctcttctcagggaatacaggacctggaaccctttgaacgacagggaaaccgcaaccgtatccgccattcctccgccacaccgcaaccagggcggcaaataccgtcccgacagccccgtccggtctgaaatcgattcaaaccggacggaaaacaggcaattaataaaacggaaaaaccttaatctgctttgcgggaagcgtgcctcttggcccgttcctcctcccgctgcttcttcaggtcttccttcatcttggccttctcttcggaatccagcttgccgtccttgttaacatcatatttttcaaggagggcggctttcttttccgcagaagtcattctcttgggagcgtcttcctccgccatggaaggtatggcgaaagcaacggccagaacaataagcaaatacttcatgattaaacggggttcttgaataatccttttctactcccgcgcgtcccggttgtctctctttttttagcaatacatgcaaattccccggccatgccccttttctgccgcgtgaactcccccccggttaagccttcccgaacgggaaaaatagcggaatcaccactaccatgaccagccccatgatcacctgcaggggaacgcccactttcacgtaatccatgaacgtatatttccctgcaagcataaccagggcattgggcggcgtggaaaagggagaagcaaaacacatgctggtgcctacggaaaccgccagcagcagcggataggggctgatgcccatactcgccgcggattgcagggcgataggcgccaggagcaccgccgtagccgtattgctgataaacatggtcagcagggacgccgtgaaatagacgcccgccatcagggcaaacggcccgaatccccccagtccggccaccagcccgtgggaaatggcctctgaggctcccgtcttctccagcgctacggacatcggcagcatggcggcaatcagcacgatgctctcccagttgatcgtccggtacgcctcctccacattgcgcagacagccgcacaacaccatcaggacggcggcaatcaataccgccgccacagcaggcacccagttgaacaccatggccgcaatcatcagcagcataatgcctgcggccaggggggccttatgcgtcagagtcaccttggaggcctccgccaggggctggcccacgacaacccattcaaaagttttctcgctcaggcgcgcaatatccgtccaggttccctgaatcagcagcgtatctccgtactggagcttcacatccttcaaattatggaaaatgtaatggttgtcccgctggatggccagaatattgaccccgtacttggcgcgcagccccgaagacttcacgggcatgttgataaggtccgagttccgcatgagcagcatttccgcaatgcctatctcgtcaaacttcaatttgcttttcaacagggaatccgtatcttccgacgtcttccggttaatcatctccgccccatattcccgggcaaaacgggccacgtcctcaaactcccccatgacataaatgacgtcgccccgggccaccctcgtatctgaacccgccatggtctggctgaccgtctgcaggaaggaatgccggccggaatgcctgcggcgcacctccacaatattcacgcggtaaaggtccggtatctgaagatcatgcagaggatgttccgtcagaggggaatcctccagcacccggaggcggtaaagattattaataatctggtactcgtctatcaactggctgagggatttccccttggcctcgtgttccgccctgtcgtcatggcgtcccagaaccctcctgctgagggggatcagcaccaggatgcccgtcacgatgcagacaaggccgatgggggtgaacgcaaaaaagcccagcccctccattccggcctcctgaagctggttgttgacgacaaggttggggggcgtgccgatcagcgtcagcatgccgcccatactgctggcaaatgccatgggcatgagcagacggctcgtctggatgcctccgtccgcagccaggctcaccagaataggcagcatcagcgctaccgtccccgtattgctgacaaatgcgcctatgccggctgtaacaagcatggtcagcaccagcaggcgcaactcgctcctgccggccagtttcatgattctgccgcccatcatcttggccaggcccgtccggaaaatggcgcctcccaccacgaaaagccccaccatcatcaccacaatggaattggaaaagccggaaagcgcctgttccgggctcaaaatcccgaacacaatcaggcagagcagggaacacagcgcgacaagatcagaacgaatcctcccctggacaaataaaacggcggatactcccagaatgagaagcgtggtcaacatagcaataaacggcaggagtgaaaaaacggcaagggaggatatctaacatgaccggcatgtcttgtcgataggctgaacaagtcattcacaaaaccgtctctccgccggcatccggcagaaaaaacactttatgcatcctgctcggagaaccccgcttcctctttccttctccggtatcatggggatgaggaaacaataaaaaacgcgctctctgaaagaacgcgccataaaatgaaaagtggtgggtagagaaggattcgaaccttcgaaagcaaatgctaacagatttacagtctgccccctttgaccgctcgggaatctacccacttgaagtgatgtgcggcgaatgtatagggattcccgtgccttagcaagttttttttataaaaagtaggtcctcccagaagcagaaaccccatatgcaacagccatgccgccggaaggaaagctgatgcaggaacacaaggctggaaaaggcaatgttcacgaatctcccacatataccggagcgcggctgtccggggaatccgcatccagttgctccagctggggcagaatgttctccatgctctcccatacggagggaacaatcttgattgcggttccaaaccggactgccatcatcaaggcgtctgaagggcgggcgtccagctccaccagcttgtccatcacctcattggcggcctctatggtcacgcgggcataaaagacttcatccttgcgcccgttgataagcaccagcctcacccggcattccatggcggataaaaagtgagccagcagggaagacgtgtccggccgtaccgggcgttccccgttcaggcagcgttccagggccatgccgtctgtcagctccatgaaaatgacgcccaccttgccggtcagcggatcacgcaggcacacacccgccccggcccgggtgtaaagcagggcgtaaggttccagagcaatcaaattttcatccggcatggcgggcggaaatcacatgttaaaaaccgggattaataacccgttccgtatagcgggcagccaccttgacgtatttttccgcccatttgtggttattatccgcggattccggccccaggtccttcaccaccttggcaggagaacccagcactagggaattggggggaatgacggtacctttggtaatgagcgcgcccgctcccaccacagacccctggccgatgaccgctccatccagaataatggaccccatgcctatcaggcaattatcctccaccgtgcaggcgtgcagaatcacgccgtgccccacggttacgtacttgcctacatagcagccgaaatcgtctgccaggtggatgcagctgttgtcctggatattggagtaatcaccaatgacgatcttattgatatctgcgcgcagcgtggtatggtaccagacgctggcatgttccccaatggtaacatctccaatcaaatcagcgctttccgccacaaaagcggtatccgccactttgggccagaagttcgcgtaaggttctcttgccatataagtcatgtattaattgaagataagacagcattccagtctaaaaacgttcattccgcgggtatgccgcaaccggaaacgaacacggccgaacccacccgaaaatgaaaggccgcaggcacctccgcactaattttcttcccggatgcccttcttgctgttcttctcccgcttctccgcatccttgcgcagggagtcggcttttttcccattacctcccttttcataatacccggctatcctccgctggatggcggcttccttctttaccttgaaataatcgcccgatttagtccggatataccggttgtaggaagattccgcctccttggccagctgaagcacggcctcctgatcctgggaaacgtactcgtaatattgccccatcagcgcttcaaatacttccgcgcggcgcgcataatccttcatggacttccggtacagggcagccaccccggccttgtccccgttttccatcaggagatccgcctgccgcttgatggcggcggaagtcaggtcgctgcgcccctcgtccgtctccttttccagtttcttcagatcgcgggcaacatggcgcttattggtggaagcgtccctcatggggaaaatatactcatcttccacgcgggcggccatggccaggtaatccggacgggaacggaacttgcgcttaatcatggccaccagttcatcccattcttccagcttcgtgccgctctccgggcggcccatcagagcaatcaggcgttcccagcccagggggctgccgggaatggcctgagtggcggcttccagcattacccgggcgcaatccggcttctgcatctcctcaaacaggtccgccagggaaagataatccagggaagtatccagccgggcgccattcaccctcttgtccataccctggagaagggtggattcatgctttgacttgcagttgtgcggatgggaaaaatgccccgtattatatccgtacccgccgtaggactgccaggtttcatccgtcgtcagcagattgacccaggcatgcggcccgcggttgccgtccccggtaacataggcggagggaatgccgttgcatttggcggtattcaccgcaaaataggcctggtccatgcaaatgccgccttcatccagaatctcctggaaggtataattagtgtaagggtccttgcccagtgcggcgcggtccatccggtaacggatcatggaataggctccgccccatcctttccgggtaaggcgcacctttttgcgcgcccaatccatctccgacctcggcagacgcacatccaccacaaacaacagctcggaagggcttaatttggaaatgtccgtgagaagctcacgggcttcatccatctccatgaagtactcgaatacctgttccagcgtcaaaggcgtggtggaaatattggtggaagaagacgccctcagcttggacgggctggaagcgatgcggggattcagcatggcgcaggccagcgccagggaggaatacctgctccggggcatggcggaggttttcatccagaattccgcccacttcctcaaaatccctccccactcctccccgggtgtctgctcccgcgccatcgtgcgcaggaaaagtctgaggggatcggaaggatctgaaaaaagccatggatagaaatacctgggggaactctccttgatttgttcctggatggtttccgctcccactttgctgatgagctggtacagctcattggcgcgcatgaggtacgggctctgatcgtacatggacgcgtcaaatttgccgaatttgatgaccttcacggcatcccgttccaaattggagcgcaggaaatcggcatacaagtcatagcggcccgtttccagagccagattgaaagcatccgtaaacaactttctgttggcggcgttattggccttcaggctgaccagaagaacaggcttcttgaaaatctccagccgcggatcttcctcctggaccacgggttcttccttcggttcctcaggggaaggctccgccacttccggttccttgttctgccgttttccggcggcttcctcagcagccaggcgttccgcctcaagacgggctttttcctccgcctccgcgcgcatccgttcctccgccttcctgcgcgccgcctccagttccgcgactttccgcgcacgcgccgctttcgcttccgcctcctttctggccgccagctcagcggcggcagccttacgttgaacggaaacccggtggtaagctacccctccggcggcaagagccagcaccaggacaatagtcataataattccgccggaagaggattttttatgcttgggaaaaccgggacgcagaggattgacaggattcatggggatgcagcttgaacgcgttgaagcaaattggggtgggggatgagacggttttatccctgttccgtgtgacataaaagcgcaatacctttccgaggtcaacttgaaacaatggtcttttgctgaaggttcgttttcccggaacccgttaagaatcaaaccagagtatttttccttgtattttcatagccattttatagtatcaggcctcttcatgtttccaaaaacatgagaaaaacacaagtatcttgctgattattcctggctgacatatgtttttcccgttgcctatgaacactttctctcatctcagtccgtttctggccgttatttcgggaagcctcttctccggaacggccctctgtaacgacatcgtgctgcctccgccagataaaaagggaggaaagcccctcatgcaggttcttcatgaacggcattccaccaggtcctttgcagacaaacctatccctgtggaagtcctgtcctccctgctctgggcggcgcaaggcgtcaaccgagacgatcccgactatcgcacggcgccgtcttcccggaattccaatgaaatagaaatctatgtcgtcctgccgcagggcacctatctttacaggccggaaacccaccggctggagaaagtggttcagggcgacatgcgggccgctacgggaacacaggaattcgcggctaccgcgccgttaaacctggtctatgtagtagaccagtccaaacagccgggagactttgatgccaggagaaagctggtcacggcctgcacggatgcggggtttattggagaaaacgtttaccttttctgtgcttccgaagggctaggcaccgtgttccgcgccatgattaacgccaattatatccagcagtgtctgaagctccccgtcctcaaaaaagtcctgtacgcccagagtgtcggctatccgtcaaaatcctgaaaaaaccataagccggaacgctgtgagactcgccgttccatcggcggctcttcctcatgcctgcgaaaaaccgtcatgggaaccgtcgttcccatggagataaaaacgccaggaaccgttgccgggccagtcaggagcgctctcttccggacagctcggcaacaacggaaaaagcgtttggcgaactgttggatgaacgtttcgggcaagcccggctccgccactccgccctgcggcattggctggagaaatgttcaaaccggaattcccgggaaactgcggcgccaggaaatctactccccgcttgcggtctttcccatagttcaaattcatggaaaatccggaaccgcaagcggaaaacgcaccagcattaccactggttgtccaggtttttggtatttatctttccgggttccttgttgcgttccttcatgccgcggacaggcttgggctccttttcgtgcaggtccagaatatcaatcacattctccccttttttcaggaatggggccggaacatacagccttaactgaggtcccacattccaatagcgccccacgttgattccgttcacccatacataccccttgacatagcgggacatatccagaaacgtgtcctgaggctcttcaatatttacaacggcccggaaatgcgccccttcccgtttctgggaaggcccctttcctttgggagcccgcacaatggaatcagctttcaggggaagcgccctcaccgtccagttctttaactcccgcgttcccagtttcacaggaccgtaaatccccttgcggtcactctccatgctgatatgaaaattaatatgccccatggcctctaccagaacttccagcgtccccggcttcctgcgctccggcagtttcacgctcttctgccccagccgccgatccagcgtgccgaccagctctccatccagatacacctgggcatagtcattgacattggtaaattccagcgtttcaggcggtcctgacggaacggccgtgctgtaaacggcaataccctggttctggttccattgttcaaaatagggaggctgcgggaacttggaccggaaaggcttgggcaggttctcccaaaggccggcatgcactgcgggcgtgaactccggaatttccatggccggaatgtccgcgggaggttccggcacagcggcttcgggaggcaactttttcaaaatgatttccctcatctgggcataatattcattcatccgcccctgctcatccacgggagaaccgtaatcataactcgtcaggtccggctggtattttcccggccctccgttgttggctccggccgagaatccgaaattggtgcctccgtggaaaacgaacaagctgaaggaacgccccttgtccataaaccagcggacgtggttgaccactccaggggtgggagcccaattcccctccccccagtgccgcagccagcccggatacgtttccgaggaaaaaacgggaactcccggattgcatttattagccactgcccaatggccgtcgttcagccccggatccagccctacggccacgcctggaagcaccacgcctttcagaaaatgttctcccgcgccgtcggaggtgtaaaaggggccaaaacccttcctgctccagaacgccttcagccattccatatacttgcggtctttacgctggtagctcccgtattcgttttcaagctgggtcatcagaatggggcccccgtttttggctaaaaaaggctccgccacacgagccacggcctccagataacgcgtctgcgccttcatgaatttggcgtcttccgtagttctcaacttggccttgggatccttcagcaaataatgaggcagcccacccagatcccattccccgcatgcataggggccggggcggaataaaacccacatgccttcctcctggcataacttgaggaacccttccagatcccgattgcccgtcttaaagtcaaagctgccgtccggctgctcatggtcattccagaacacgtaaaatgcaatagtattcagccccatagccttggcggtcctgatgcggtgcctccagtattcccggggaatgcgctggggatgcatctccgcgccgcggatctggaagggtttcccgttcagcatgaactcctggttcccttccccgccgaacccgaacacaacggggagtcctccggaaagagcgggtttctgtacattctggacagcctcagggccagcccatgccaatgctcccactccgacggccatcagtgcggcagaccaactgaaaccatattgcttcatcatgttgaacagttaattcatttgaagacggttgccaataacaatttttttctctcttctccgaatcttcggaatacccttcccctccgccagaaatctgacggggccggacggaacggaggccttccgttccgtggaatgtaatcatgtcatatatcttcatccctttgtatgaaaaccggaggacgcctgtctaaattgatcaatatgaaaacaattgttcttcttcgccatggagaaagcacgtggaaccgcgaaaacagattcaccggatggacggacgtggatctgacggaattgggaatacaggaagccaaccacgcgggcgaccttctgaaagacaggggaatggcctttgaccatgcctacacctcttatctcaagagggccgtgaaaacgctcaactgcgtgctggaccgtttggaccaggactggctgcccgtctccaaaagctggaggttgaatgaaaagcactacggcatgctccagggtctgaataaaagtgaaacggctcaaaaatacggagacgaacaggtactgatctggaggcgcagttatgacgtggcgcctcctcccctggcggaggacgatcccgccaaccccaaatgggatccccgctacaggggagtgccggacagcgaacttccgcgaacggaatcactgaaagaaactattgcccgcatgatgccctactgggaagaaacagttctcccttctctacggacgctggacaatatcctgatcgtagcccacggcaacacattgcggggcatgatcaagtatttgaaaaacattcctgacgaacagctgctttcccttaatcttcctaccgccaccccctatgtatttgaatttgacgactccctgaacctggaaaaagactactttcttggggatccggaagaaatccgcaaacgcatggcggccgtcgcttaccagggaagcgcaaagaaaaaaacgcctgcggaataaccccactatcctttcctatgaccgcccattcctgccgcattgcgttctttgacgccaagccctacgaccgggattccttcaattctgtcaatgaacgcgaattccattacgacatccgttacttcaaggggcacctcactccggacagcgtgcccctgacccgcggtacggacgtagcgtgcattttcgtcaatgacacggcaaaccgggaagtaatacggaacctgaagggaaatggcgtcaaattgctggctctgcgttgcgccggattcaataatgtggatctgaaagctgcggaagaagcggaactgcccgtcgtgcgggtgccccaatattctccctatgcggtggcggaacatgccgtagccctgatgctttccctgaaccgcaaaatacaccgcgcctactggcgcaccagggacggcaatttttctcttcacggcctgatgggctttgacatgaatggaaaaacggcaagcatcatcggaacgggaaaaatcgccagaatcctcatccgcattctcaaaggcttcgggatgaacatcctggcctatgacctgcaccctgaccagcgctttgcggaagaagccggcattacgtacaccaccctggacgatctgtacgcccggtccgatatcatctccctgcactgtccccttactccggaaacggaacacctgattaatacggattccattggaaaaatgaaggatggagtgatgatcatcaacacgggacgcggcaagctgattaacacggaaatgctgattgacggcctgaaatcaaaaaaagtgggagctgccggactggacgtgtacgaagaagagggagaatatttctacgaagacaaatccgacaggattattgatgacgatactctggcccgtctcctttccttcaacaacgtcatcctgacttcccaccagggctttttcacgaaagaagccctgcacaatattgcggaagtcaccctgcacaacatccgggactttctggaaagcaaacctctgatcaaccgagtctcgcttcagtcacgctgaacgtgcccggcgggcgctctacggaaatccgggactttctcatccgccttctgccggacagaaggcggaattcggggaaaggcggcagcttttttatgcaagcgccgccactgcccgccgtattatatactatgagcactccagccccagcctccgtcctggctcccaaaccgcactacgccgctctggacggcctccgcggggtggccgccgtcatggtggtcctgttccacatgtttgaaggcagcgccagggacttccagttccatacggaccagatcatcaaccacggctacctgtccgtggacttcttcttcatgctgtccggcttcgtcatcggatacgcctatgacgaccgctgggaaaaaatgaacctgtggaacttctgcaagcggcggctggtgcgccttcaacccatggtgatcatggggatgctgctggggggaatcctcttttacttccaggggtctgaaatcttcccgaaccttgcgcaaacccccgtatggaaaatgctgctggtcatgaccgtgggattcacgctgctgcccgttcccgtttccctggatgtgcgcggatggtcggaaatgcacccgctgaacggtccggcctggtccctcttcttcgaatacgtcgccaatatcctttatgccatgctcatcagaaaatttaccagcagatggctggcggtcctggtctttctggcgggctgcgccctcattcaccagtgctacacgcagggcaacaacatcggcggctggactctggatgcggaacagtgccgtgtggggcttacacggctcatgttccctttcttcggcggtctgctcctgttccgcctgtgcaaacctggacggatcaggcatggtttctggtggtgcagcctgcttctggcgggaaccctggcggcgccccatgtaggaggcgcggaacatttccgcctgaacggcctgtatgacgccttctgcatcattgtcatctttcccgtgatagtcttcctcggagccagtgacatccctggagacatctcttccagagccagccggtttttgggaaacatctcctatcccctttatatcacccactatcccatcgtatatctctacctggcctgggttcacgatgcggaagtccctctttcccgtgcgctccccgtagcggcaggcgtcttattcctctgcattgccgtagcctacgggtgcctgaagctttatgacgagcccgtgcgcgcatggctttccaaacgcgtgctgaagcggcgtcctccggaacccggggcgtaaagcggaacaaacatctgccttgccccgggcggggccaggccggatactgtcggcggtctttcatggaaaaactgccgacatcctccaaagctctgcgctacctgccctttcttgtggcatctgcattctttatgcagatgctggatgccaccatcctgaacacggccattcccaccattgcccgcagcttcaacagccatccgctgcagctccactccctggtaacggcctacatgctcaccgtctgcgtcctgataccggcctccggatggatatccgacaaactgggttcccgccgtactttcctgctggccatctccgttttttccgtgggctccctgctgtgcgccctttccgcctccgttaccatgatgacggtatgccgcgtcatccagggaataggcggcgccttcctgatgcccgtcgggcgccttgtcatcctgcgctcctatccccgctccatgttcgtcaatgtcctgaacattgtaacgattccggcgctgctgggcccccttctggggccggtgctgggcggtatcatcgtacagtacgcttcctggcactggatattcctgatcaacatcccggtaggcatggcgggcctgtgggccacctggaagctgatgccggacctgaaagcggtccgggaacagaaattcgactggccgggtttcttccttttctcctcctccgccgtcctggctacgatgggcctctcttccgcaggaggcataaccgataagccgcgcatggtcatcctcacgtctgccggaggcattcttcaacttctgtactgggtgctggcgttccgttcaaaagcccccatcttcagcccggccctgttccgcatcagaaactttgccatcggaatcgcaagcaacatcgtctgccgcctgggcggaagctgcctgccgtacctgatgccgcttttcttccaggtggtgcttggttattccgctcttcagtccggcatgtccctgattccgctggccctgagcaatctgctggcaaaaacggttgcgccgcgtctgctcgggaaatttggttaccggaacatcatggtcgtcaataccttcaccataggatcgctgctggcctccttccgctttgtaggccccggaacccatgaacttattctcctgggcatgctcgcgttgctgggcggggccaactccattcagttcacctgcatgaacaccctgacgctgattgacctccccaatgcagacgccagcagcggaaactccctgctttccacgatcatgcagctctccattgctgtcagtattgccgcggcctccctgctgctggacagcttcggcggccattcggctacctccggaaaggctgtggaaaccgcctttcatgccactttcgccaccatcggcgccattgccgcggccagttccttcatcttcgccctggtggacaaagacaagggaatcacccgcaaacggagaaaagcagcttgaagaagaaaattcccgcccctgttcaggaacaggaagaggaatctcccgtctcaagagaacagcactgcgcaaaccgggcgcgggactcttccagggtaatcggtttcttatcctcccccagggctacataaaccagctccgcctctgtaattttggcaatgttattgcaaagcttcgtcagacgttccgcatacacctccaccttcacggtgacggaggtgcggcccaccttgataatatccgtataaaaggacactacatcgcccaccagcacaggagcttcaaacgtcaggctgctcaccgcacgcgtcacaatatagcggctcaatgcatagcgcatggcggtattggctcccgcaaggtccacctggctcatcacccagccgccgaatacttccccgctctgattggtatccgccagcattggttccacgcgcagggcgggaacgcgcccttccggaagctgggcatgacgatatgtattttccataaataagaataattataaattgataaggacatgcttatctatcacagccctcttgtaaagggtaaaacgcggaagcggaaaacgggcggcgctggcacgctctgcgggaaaaagaaaacagcccggaataaactgctttcccatattgattaagttgggcaggcggatttccgtgtcttatcccggagcttttccaccatggccggtaaaggcggttgtccattactcatggaccgcaaccatgaatccaaaacaaaaaaagtggacggggaggcacatcccgcttccgactttgcctacgtacccgatccggaaaagccttccacctggaaactgccgattttcaacatgcgccacgtaggaggggccctggccgccatgaccagcgactatcgcggcaaccccgtggaaataccggaaggagatcgccgtgccgtcatgaaaaaaatcctagccaggaaagcgaaactggaacaggaagaaagctgattccgttttctttcatttctttttttccgcctgtaaacaggaaggaaagaaatatcttttcccttcgttccccggtcttagccgtttggggacgggctgacaccatccagataccggctttctgcggcgcctccggatgaccgggaaagcggccggaaacggctctgcaaagaaatcagggcattgctccatttcccggttgtcccggcaaaaggttcctgcttgaatagggtaatggcattttggaggttttggttcatctttttccctttcacggcgcttctcttttccatggtgcatggcagtcctctgaacgcacccgtcatcacccttggagagaaaaaaagcctgttcggagaaaaaacgcaggccaatgaatatgtcagctatgccctttattactggccggaccccgccaatccggacggtccttacaaacccattgacggcaaaaagaacaaacggctccgcagcatggacgacagcggcaggatggccgctttcatcagcacggtctgcagcctgggacggcagtataaactcgacagggatccgcaggccgcctcccgggccgggcaatggctgaaagcctggttcattgctccggcaacccgcatgcagccccatctgaaatatgcccaaattcgccccggaaaccggacggaaggaggcggaggaggcatcatcgacctttaccgcatgcccgaattcctggaagctttgacggcgttgaaatgctccaatgccctaacggcagaggaatggaagcaggtggacgcgtggctgaaccagtattacacatggctgactaccagcaggcagggcaggcatgcacacacgcgcagcaacaaccattatctgttttatgtggcgcaatgcgcccatttggcatccttcctgggccgcagtcatgaagcggcccaatggctggcggaagccttcgccaacatggaccgccacatcgctcccgacggatcccagcccgaagaactcaaacgggcggaaccctggcaatacagcgtttacactcttcaggcatggggatacctggtgcatcttgcagaacgcatgggcgacaagaactaccgttaccggaaaacacccgccggggcttccattcaaaaagctgtggattatctcctgccttaccgcgccaaccctgaaacatggccctggcaaggctccagggcaaacactccgctgcccgccatctttgaaccggagcagacgggtaggccacaacggaaatgcccctgaaccgcgcccgccgttaaaagcatccgtttttcctgcttattgaaaatcccctgtccagcagcatcacgaacggggcattttcctggaaaacgatttaataagaaatctccccagtatttttccccttagatttttcctttctttttgctgctttccattcccacggagatatgggattcggatcagaccagatgcctttttgggcctttctggcatccctttcaagagaaacgagtttccggctggcggaaaaatttttataaatccacgcccatccttccttcaccatctcttcgttgacgaacatttttccatgccatatttcccctaaaatacggccgtacctgtcattctcggtataccggactgtaaccgtctctccccaaatcagcttttccaggtattccttggcgccgtcatacccgtcctgccccctttccggcgtatcaattccctcaagccgtatccggtgcgtacgcatttgttcaggcgtcttttccagaaggatgaccgtgtcgccgtcaatcacgttaatcacgactcccctgatactttcagcaaaagccatgcagggacttatcaggaaaatcaaaagccatttcatgaaaaatgatataatccaaaaaatatcaggatgcaactactctttagagaaaccgttcccgcactgttcacacggccggaaacagatgaatgcggtcatctgtggacagcctgttctggaacaggccatcatgttttccggcatgaaggaacacaattcccgaacctattccaacctgtccggaacaacggtaaacaggctgtatcattgccccgctccggaacatctttattcgctgccgtgccgggagcggaagaacatcccgccggcgcaccccggcaatctaacccatgccgccatttaaaaagactgcacattaaacaagaaaaaccgggcgccctgcaacattcaatggcatggcgtgaggaatttcactcattttttcaattcttcggctattctgccgaggttcttttccgttgcctttctcagtttctcctgctgtttccagtaccatgccgttctttccgacaccccggcctgattcgccagccagcgcacggcgccgctcgtgtcacagcctgttttcttctgaatgacttccagcagttgagcgacatatttattcatggattccgggttgatattatttcgattcccatgcccggctgaattcctcgtcccggaacagggaggcaatcccgctgagctgcttgaggcgcaacaattcttccgcatccatccccagatttttgagtatccacgcatccgacatgcctgcctccgtcaactcctggataatattggtcatgagggcgatattatgagatccccgggcacggttgtgcctgatggtggaagccatgcggtttccaagaggcttgtcgattacggccaccggcatcatgccaccctcccgttcgtaaatatcgcggtaagtcttcatgatctggcagcggtggaacccgtccacgatttcataggtcccgtcctccagcttataacaaacgataggcatcgtataaccgtcctccttgatgctctggtagagcagcttcatttcggggggagctacgctgttcgggttataggcattggaacgtatctggtccaggggaacgcgccggattttgtaaacgggggattgataggaggttttcataaaatattgcggtatttattgacggcggcccggcgccgggcaatcgctcccttggttggaccgaacccggcgtacttgcaaaagtaatcattcttcatgatgcagatgcacatgcgcttgtaggaaggcacctgccggaaattgctgaccggcatgtcgtcgggatagcccataaactgaatgacgtcgcggtcgacgtaacggcccgactttcccgtcacggtcgccagaggataggcggccagcacttcatcggcagttccgggatcgacggtgccccctttcatccagtactttttagacctctccaaaatgttgttgtagtgttccgccgttttctcgttcattgtggaaagcaggaattcataataggacttccaggtatggccgggcggcagtttgatggttttccagcccatggccgtcgtacctccgtacaaacctgtgaagttgacgccgttgacgcgcccgaccatgcgcgcccagttggcaggatcaataactttgtaaagcttcaggctttcctgggcgcagtcattaaacgggcttgccacccgcatttgcccgatcgtaaggcctgcctggtacaggagatcgtaaaggcggttatagtcaaaaccaaaacgggcgttggccgtccagacgtcactgacgcgccagtcataaagagggtaggcgctgacggtcacggcatcagcccgtgtaatccacttccttccctcataagacgtccttttattgccgcgggcaacggcggcgtatctgttgaggctttcatccgcccgcagccctaccatgacggcagtacttccgtgttttttggcaaaatggcgtgaaagcttatcctggaattcatagtccaccataccgtgccggaacgggacgtccagattcttttcgttgattacatagggattttccggcatgggtcgcacccacagttttttctgggcggcgctccacggcgtccagtaaggttcccccagggagcatgcggactgggccctgatcggtacacagtaccacatcttacgaatgccggggaattgctccagaaatgttctggtgacatactcggtcgtcatctgatattgggcctcataatcaaggtgatacatggacagtttatccagaaggccctgttcggcggcgtaacgatagcagagattaagcatgacgccgctgtccttgccgcccgaaaaagacaccaggacattgtcaaactcttggaaacaataggctatgcgttctaaagccgcctcataaacatttttatccagatatgttttcacaacttttccaaagcctgtctttcgccatccgccgccagccccctgccggacgggaacacgtcggcccggatatgattgccggaagccatgcattttccctgaaaccactcttgcagcttgcagctcatagggatatcccctgttctttcaaacagggttgcaacgccttcatttctgcataaataagcaacatcatgttttttcatgttttcaaatgcgcagcagcttatcgtccgttattttccgtcaacaataccaacctactgaattattgcggcgggtcaatgtttttactgcaattatttcagtaattttattgtcatcaccctccttctcaaaatacctgcgctttttagcgagcaacaccattccagaaatgccttatgcattgcgccatgacctcctttccttctccgcaacatccgcgctatgtgcagcattcaagacgctgctttggaatgcacggtttcaaaatcggagatacaaaaatcataacttgcttaaaattaggtgaacgaaaaaatgtacgactcagagccattttccggttccaacatctttcccccaatactctttccggaaccgcatcttccaggcagacgatacatccatcatttccctcctgaaggaaaaataaccgtgtttccctttttgcaatccgggttgctgtccaaacatgaatatgccggtacacgccttaatcatgccgtcagattagactttaggcgttttatgattttccccgaaacgccaatttcatgccagaacggaatcaaaaaatgacatttagtcagcacttatggttgtttttccgcggtttttcacctttccagcctcaaaacagacaaaaaagaagccctgtaatccattaaaattacagggcttagaaaattagtggctcccccggttgggctcgaaccaacgacctagtgattaacagtcacccgctctaccgctgagctacaggggagtttgcattccatggaacgcggagggatttttactggaggtacgggcgtttggcaagtacttttttactcttgcaggctttttgacgcaaaaaggcttccgcggcgcggtcatggcaacggtgttttcttgacctttgaagggagaatgaccagactttcagcgacatgagtgaacatcaccatcatattgctgtcttggcaagcgacggcatcgggcccgaggtcatggcacaggctctgaaggttctggatgccgtaagcggcaagtttggctttaccgtaagccgcaaggaggcatttgtagggggtgcgggcattgaccactgcggcaaggctcttcccgaagaaaccattcgcgcctgcgaagaggcggacgccgttctgttcggctccgtgggcggtcccaaatgggagcatctccccgcctatgaacaaccggaacgcggagccctgctgcctctgagaaaacatttcggcttgtatgccaacctgcgtccgggcgtatgccttccggccttgacccatgcctcccccatcaagaatgaactgattgaaggcggattcgatattttatgcgtccgggaattgactggcggcctgtattttggccagccccgtttccgcgaacgggagggagacgacgaagtcgtcgtggataccatgcgctaccataaaagcgagatggtgcgcatcgccaaagtggcgttcgaggctgcgcgcggccgccgcaagcgcgtcaccagcgtggacaaagccaatgtgctgaccaattccctgctgtggcgcgagacaatgattgaagtttccaaggattatcctgacgtggaattgctgcatatgtacgtggacaatgcagccatgcagctggtgcgcaatccccgccagttcgacgtgctggtgacggaaaacctgttcggggacattctttccgatgaaatggccatgatttgcggttccctgggcatgctgcccagcgccagcctgtgccagggcgcacaggacaacggcctgttcttcggcctttacgaaccctccggaggctccgctccggatatcgccggcaagggcattgcaaacccgatcgcccagattctttccctttccatgctgttgcgctactccctgggagaaaaaacagcggcagacgccattgactccgccgttcgccgcgtgattgaccagggctgccgcacgggcgacctggctacgggagctcccggagaaatccgcgtgaatacggcggaaatgggtgatgccatcatcgccgccctgtaagcagagccgttcttccggcgccgcaggggaagggacacctgcagcacgcctttcctccggggggagcggtaccgcctcccctccgctttcctctttcatttccgggattttccggttctttatctatctatcatgaacatccttatcatcggccagggaattgccggaagttgtctggcgtgggaattgaaacgccgcggcgtggagtttacggttgcagaccgccccgtagcggaaacggcctcccgggtggcggccggattggtaaaccccctgacgggccgcgccttccgccccggatggaggcaggaagaatgcctggcggcggcagaggccttttacccggagacggaacgggaattaggcgggtcctggtggcagaaaactccgattttccgggaagtggagacgaaggaccagtttgaaatctggcaggaacgccagacggctccggaatcctgcgcctatgccggacctctttttccatggccggaacactgggaaggccgcgggaaagccgcctatacgcgaggttccgccgtgctgcacgtggaaaacatggtcactgccatgcggcgtttttttatggaacagggccgttttgtggaagcggatgtatcccccgcagatatccggccgaatgcagacggtcttttccattggaacggtcgcacgttttcccacatagtctggtgtaccggctgggaagccgggcttcatccggacatgtctccgctgaaggggcgcccctccaaaggaaccattctggatttggacttgaaagagctggactggcatgccggcatcctgcatttcggacactggctggttcataacggttctttctggcgcttcggggccacctacgcgtgggcgtgggatgctcccggcattccggaagccgccgccgtccaggaattgatgctggaccttgttaaacgctattccgggaacatggacgtcatccgcgcccgtgccgccgtccgccccatcatccgccgcagccagccggtcgccggtcccattcccgggctggacggtcagttcgtcttctccgggctgggcagcaagggggtgaccacttccccctggtccgccgcccagcttgccggacatctcgtgtgcggaacggatctgccgccggatctgctgcctgccgcgctctggaaatgatacggaacatcagctgtccttccttgaacggaacagctattttccttgtcaaaaggttctgaacgcgattacatgcggcctaatatgcgagcggagaacgagaactggggcgatacggtacggaatcatctgtttgaccagcgcagcgccgtcatggtgcactggctgattctgctcaatgtagtcatctttatcctgggattcttcttccaagtggacatcccaaggaatatttacccgcctgtccatttggacttgatccagctttacggagcttacagcgaatatacgtgctttcacgagggggaattatggcggttgcttacctatcagtttcttcacgccaatctggggcacatcatgttcaacatgattgccctgtggtttttcggcccagttgtagaagaacgtttcggccattggcgcttcctgctgtattacctgttttgcggcgtggctgcagccctgttttcctccctgctggggtacatgggattttttgatccggaatggcgcttcattcccatggtgggggcctcaggttccatttacggcatcatggccgcatgcgcggtgctctttccccatgcccgggtacagcttctgtttcctccggttaatttgagcgtgcgccagtttgccctggccgttctcggagtcgccgcagccgtcattatcttccaatggaacaatgcgggcggggaagctgaccatctgggcggcatgttcgccggatttatcctgacattgctgattttatggaaagaaaagatgtcttccccaagacggaaagccgcctcttcttcccactattcccctgagccttccagccgccgcccgacacaggcttacccctctgaaaaggaggtggatgaaatcatggaaaaaatatccaggtccggcctgtccagcctgacggaggaggaacgggaaattctccggcgcgcttcccggcgctgaactatttgttagatatttttatatttttcgttattttccttcctttttgccatccatttcctagcatggatgaatgatgacacgactgtattcctccaccgtcctgggcgtagatggcgtagaagtggaggtggaagttgatttccgccccatggcggaaaaacgcacctttattgtcggtcttccggatgcggccgtgaaagaaagcgggcagcgcgtggacacggccatacaaaacagcggccttccctttcagcagggtatcttcgtcgttaatctggctccggcggatttaaggaagcagggccccggattcgaccttcccatcgccctgggaatggttgcgggagcggctgaaaaggagatggacgcttctgcctggtgcattgtgggagaactggccctggacggaaccgtacgccccgtgcaaggcattctgccgcaaatcatggaagcgcggcgcatgggcaggaagcgcatcatgctgccgcaagccaatgcctatgaagggacgcccgtacagggtgtggaaatttaccccgtttcttccctgagagaagcctggcatttgcttacttccgacgccctgccgcctccatttacaggtttagggcgagaggcccatgctccacgggacaaagacgccgctgtggattttgacgaaatcaaggggcagccttatgcacgccgcgccatggagattgcagcggcaggaggccataatatcctgctttgcggctctccggggtccggcaaatccatgctggcgcaaaggctcccgaccattcttccgcctctgagtccggaggaagcgctggagaccagtaaaatccactccgtatgcggtctgctgaaacgggggaacggcctggtggaccagcgtccgttccgggctccccaccacaccatttccgatgccgggctgatggggggaggtgcgaatatcacgccgggagaagtatccctggctcacaacggcgtcctctttttggatgaattgccggaattccgccgtgccgctctggaaaccctgcggcagccgctggaaaccggccaggtagttatttcccgcgcttccggcaccatgacatttccgtgccgtttcatgttggcagccgccatgaatccgtgtccctgcggttatctgggagacagaagaagagcctgcacctgccccccggcgcagatcgcacgctaccgccgcaaaatttcaggcccgctgttggaccggtttgacctgctgatggaagttcccgccgtggatccctccattctggcttccgcgcctgccggagaatgttccgccagtatccgggaacgcgtggcggccgcacggcggctccagtccagcagatacgcaggaacgcctttccgcaataatgcggccctttctggaaaagcactccagaagtattgccgtctgctgccggaagggagggctatcctgctccgcgccgtggaagaactggccctttccgccagagcctatgaccgcattttaaaggtggcccgaaccatagcggatttggaaggaatttctgatattcaggatgtccatttgtatgaagccgtgcagtaccgcgctttcgagcaatcactgagggattagcactatgaatctctctcctttcgcaactatcccaaaaacaaagacatattcccgttccgaaaataaaaaagaggcagcttttcagctgcctcccgaataacgaggatatttactatgaacgtctgcggcgcagcaacatggctcccaggcccagcaggcccaaagacgctacggcaggctcgggaaccgtttcgtaggaaacctgtatacctgtaattgtataagcggaagtagcgcctccagcaccaccgcgcactccggcaactaccttatacccttcctcccaggtaaggggagccgccgacatatccagggaaattgtcgttgtttccgatgtagaggtaaatgaaaaatcctgtatcctggaaagttcctcaaccagagtgccggttgaatcatatacggcaagtaccatggaataactgctgattacagaagaaggagtattgcaggaaaacgtaatggaagaaatggaatccccctcctgcggccctccaagaaccatggcaaaggaagaccccgctactccggagcgaccgcataatgtaatggagcctacatcatcctggttaacccaggtgccttcgccgtttaccgcccaattcccaacactgttgttattgccgcaagcatatattccattttgcaggccttttactttgtccagaagctgttgccccgatgttctcgccatagtggcggtctgtgatacgctttgcgattcaggaagctcagcaacaatcgtagccgcctgggcggacatcatacatacgcaactggctaacaaaacataatgataaactctcataacgctttgcattgattagaggattgttaatccgttgtcaacataaaaagttgaaagagcggtattccggcagtggacttcttttttgatgtaaggactttataaagactaatccttgcgcctcttccattctaacatctgcatgttatttcataaatcattcattattatgaatcgaacgttatcataaaccattcatgaagaaaatagatccagcgttttccccataatgttacggaaagaaaaagagcggattaacaatccgctgtcccctttatccaatccttaatgataaagaaaaagccgcctcagcaaagtgaggcggctttttccaagaagactttttaacgaatagcttccaaagcctgtttgaggtccgcaataatgtcttccgcagcttccgtccctacggaaaaccggatgaggtcaggccgtacgcccgcctccatgagctgctcatccgtcaactggcggtgcgtatggctggcgggatggagaacgcaggtacgggaatccgccacatgggtcacgatggcggccagcttcagactgtccatgaacttgatggaacgctcacggcctcccttaatgccgaaggttaccacaccacaagattggccaccgcggaattgcttctgcgccaattcataatacttattggaagaaagacccggataattaatccaggcaacatcttcctgcccttgcaggaattccgccactttctgcgcattttcacaatgccgcagcacacgcaggtggagggtttccaaacccaagttgagcaaaaaggcattctgcggagactggatggaacccagatcgcgcatgagctggacggtcgccttggtaatataggctcccttgccgaagcttttgctgtaggagagcccgtgataggaggggtccggttccgtcagacccgggaatttatccttgtgcgcttcccagtcaaagttgccgctgtccacaatcacgccgcccacggcggcggcatggccgtccatgtacttggtggtggagtgggtgacgatatccgcaccccattcaaaaggacggcaattaatgggtgtggcaaaggtattgtccacaatgaggggaacgccgtgcgcatgggcaatgtccgccattttacggatatccagcacgcaaagcgtgggattggaaatagtctccgcaaagaaagctttcgtattggggcggaacgctttggcgatttcctccgccggagcgtcctggtccacgaaagtaacttcaatgcccattttccggaatgtgacggcaaagaggttgtatgtgcccccgtaaatcgccgaagcactgacgatatgatccccagcctcgcaaatattgaaaatggcaaagaaggaagccgcctggccggaagacgtcagaatggcggccacaccgccctccagttcggcaatttttctggcaaccgcctcattggtggggttctggaggcgtgtataaaagaatccggcttcttccagatcaaacaattttgccatttgttcgctggtctcgtacttgaacgtcgtgctctggtaaatgggcaatacgcggggttcgccctttttaggcgcccagcccgcctgcacgcacagggtctccggtctcaattcctgattcatcatgcggggcatgctatgcgatgcctcctgccttgtaaagcagggaaaaccagacgtatggacaaattcgcccctgcccccgccgaagcacgcttccgggtttttcccaatgtaaaaccccctgttcccggtaaatcaaccgcaaggacaggggcgttttacctgcgcgcgggataccctacgatcgaatgaaacggcaattcctccgatacctctttcccggaaccaaccgttccccggtgaataaagccgggcatctcactacttgatttccggcaaaggggtggaaatttcctcttccgtcagatagcagccgggatcggacccgtaccagtgtccgttggcaaacgcggcacgggtgcggaagcctccgccgcacagggcgaagtgaacgcagcggccgcaacggccttcaatcttcttctgccgttccagaggatcgtcggaaccgcgcagctcaggcaacatttccgctgcagctccggccctggcatcccataaatcggaaaaccggtcacttttcacattgcccagagtaacggattgccagaactggtccggatgcacggcaccctgtgtgtcaatattggcgatgccccggccggaactgttcgcgccgccgccattccattgaagcaggccgagggtttccttcgccagaggggagccttcccggagctggcgcagaagcaggtaaattccgtccgcaggctgggttacagtcagcacttcacggttttttccctccgctttccattcctctacacgggcaatcagcgtatccatggcattccttgcttcctcctgagtcagggtctgcacttccacgccgcggccagtggggaccagatggtaaaaacagacgcgctggatgtcgttggcgtcaataaaatccaaaatctggcccatgcactgcacattgttgcgggtcagagtcaggcgcaggcctgtcttttgccccacttcactgcaaagcctgaatccgcgcaccgcctgctcaaaagaaccttccacaccgcggaatttgtcatgaacggcgccaatgccgtccagggaaatgcctacgtacgccacgcccaattccttgaaccgcgctgcagcttccggcgtaatacgggtgccgtttgtggaaatggtcaccttcagcccttttccggtggcacgttccagcagttccataaagcgcggatgcaccagcggctcccctccggaaaaaaggagggcattcaccttgtagtccgccagatcatcaatgaccgcgcaacactggtcccaatccagctctcccttaaatttccgggcagaggcgtctgcataacaatgcacgcatttgagattgcaggtacgcgtaatattccacaccacaatgggcttgcgcgcacgggacgaagccggtgcacaggattccacggcgccccctgcaaaacgaccgtgcccgtggccctgtccgtatctcaaatggtccgcgggctgttccgcccctgtccaaagtctggtaatattaatcatggtgttgtgaaagcctgggctgataagggcaaaggttgtcttccgccatcatgtctccgtaaacggcataagcgcgagaccgggaccctccgcagatggtacggtactcacaccgtccgcatttgccctgcaacgcattgtcatcccggagtttgaggaaaagggggtgcgtgcggtagatttctccagggtcatccgtccggacgtttcctgccgttatggggagaaaaccggagggctgtatttccccggtatgagaaataaacataatgcccttgccgtcccgggtgggaatggcgcggcgagcaggcttgcttccctgagcacgggcttcctgaagcgccacgcggcgataatggtgcccttccgtcgttttgacgccgaaagaaacctcatggcttatcctgctcagttttttccagacggcttccacttcttccgccgcaggcatctcatccatggcggcgcggcctgtgggcaccagaagaaacacgctccacatgcccggtttcatttttttcatcagctccacaaagtcgtcaaattctcccagcgtgctcctggtaatggtggtgttgatttgcaagtgcatgccggcttccttcgccatttccgcagcccggagagtccgttcatatgtgtgggggacaccgcggaaggcgtcatgggtactctcatgcgcaccgtccaggctcaatgacatgctctgaaccccagcttctttcaacgcatggaaatccgtgtgcaacagccgggcggtagcagcagggctcaatgctacatgcagccccttgccggaagccgcacggaccaattccagaatatccggcctcatgaccgggtctccgcctgtcagcaccagcatgggaggccgcagttccgccaactggtcaatcaggcgcaatgcctcctcatgagtcaattcatccgggtggggacgcggctgggcgacggcgcggcaatgtctgcatgcaagcgcgcaagcgcgcgtcacttcccagaagaccaggaaagggcgttcattgagatctgtttcactaaaaaccgggcgcatttttcaggacagccaatttagaacaattataattttttgaccagcccaaaaggacgcatcctttaaaaagttcacttagccgcctcttcacggattttttgaacttccttaggcagttcggaaagggaattcagagcttccttcaggttcctggaagcatccggagaaagcatgatggccgttacatgcttgacaatgggctgcatcatttccacaagctgctgctgcactcccatcagcttggcctgctgattgcgggtgagaggcggcagggcagcctgtttcctggcaacgtccagcatagccgcccggtagcgacctatctgttccacagcagccttgccggtttcttcatcccttaccctggccagagagtcgttaagcttttttacttcctccacagttttggttagcagggtttcatgcgtgttgccctccgcatcctccgggaacggctccgcctgctcagccttatcccgggaagcctgcgccagctccttctgaacagactgtaaatccgccagggctttttgcaaatcgggcgtaagcagaccttccttcttcaaacgggacagagattttatcaattcacctgaaattttctgtgcttccgttatctgggcggaaacctgagcctgctcctgaagcgtggcaccaggaagctccagctgtcttttcccaatgtccagcagctttttatgaacctttttaaccgtttccacagcagcggccgccccaggttcatccgttaccttgtccagagccgctgcgatttcatgcatgctggcaacgctctgcctggtcagggaaagatgggaatcctgggcaaatgcggaggctgttatgcaaacggcagtgcccaggctgatggaagcaacaattttattcatgatacggaagcctttccggtatggaagaatacgttttcctcctttccccgtcaatggcggctattgtcaagaccactatatgaaaaaagggctgtccgcggcagacagcccttttgaaatcttaacagcccggccttagtcgcgctgctggcgtgaatacttgtagtagctctggaagctgagttccgcagggaattcgctcaggccgccattgggattgtattccttgaggccgctcatgccgcaacgcccctgataagggggcttgtacgtgcatttgtaagtaggagcccagaaggtgacaagttcataaattccgtagcccatgcgttcaaacatggtagcggtgccatcaacaatgcctacggaaaaaccggcataatctccctcgcggctcgtccagttgatgattcccagcggaatttcttcaacggaataaataaggttggcgatggcgcggcccagcttgcgggtgggggtgtattcggaagcagggggagcctgaatgtccgcactggcgacaccaacgacgccggcggcaaaaagagctgagatgatggcacgtttcatactgattgtttatatagtataatttgtcgagggaaagcaactcaaaaaaacaaaaaatcaatctaattccggccgggggtcccgcgtcatgagttccgcaagcgcttccatcggcggcttggattcataaagaacggaataaacggcgtcaatcaggggcgtcctcacctccagcttccgcgcaatttcatagacggatagcgtgttgggcaccccttccgccaccatgcccagggtatccaggatttcctggagactcttcccttccgccagtctccgccccaccgtctggttgcgggagtggcgggaatagcaggtaacaatcaaatcgcctactccggaaaggcccatgaaggtttccctgcggcctccgctggccacgccgatgcgcgtcatttccgccaggccgcgggtcagcaaagcggcctgggcgttatcccccaggttcagcccttcgcataagccggccccgatggcaaagacgttcttaatggttccgcccagctgcatgccgataatgtccgtagcggaataaacacggaaggttttggatgcaaatatctgctgcacccaatccgcatacttcggatcttcaaatccaatcagggaggcggacggaaggcccaggcagatatcttccgcatgattgggaccggaaagcacgcctatggggttggagggcagatattcctgaaggatttccgtcattcttttatgggttccctgttcaatgcccttggtgcaggagacgatgacggcatccggctgcaccggcaggctgcgcagccgctgggccacggaacgcatggctacggaaggcaccactactacaatgagttccgcatccttcacctggcccaggtcgcaagtaggatggatattggaggccaggggaagggcggttttcgaaaggacggggctgcgtcttgtttcggcaagctgcctggcctgagcctcttccggcgtccacaggacgacttcacattcccgggtcgccagaaccatggagagggccgtgccccaggaaccggctccaatgactgctattttatgtaaccgattcatcatcttacttggactttttggaatagaaggagtgctccgttccgttgagaagccttgcgatattggaacggtgcttgagaatcaccagcgcgcctaccaccgtgaaaaaggcgacgtaaagtatctggggggagacatccccgtcctggcaaagcggataaatccaccatccggcggcgatcatcaccacagcggccaccaggctggccagggacacgatgccggagattcccataaccaccagccaagaagccagagctacgcaagccaccaccggattgagggcaaataaaacccccgcggttgtcgctacgccttttcctcccctgaatcccaggaaacaagtgtaagtatgaccgagtataacagcgaaacaggagagaactaccaagacattgaaatcccagccgcccgcatcccccgtcaggaacggcagccagttcaaggcgccgaacacagggatgaacccctttaagaagtccagaatgaaaacggaaaggccccacttccagcccagtacgcgccacgcattggtagcgcctatgttgcgggaaccctgctgcctcaggtcaatccctctgattctgcaagcaaggtagccgaacggaatcgctccgatcaggtaatagaaaactatccaggcaatcatgttgtgcggagtgcattttaatcccccgccggtcaaatgacaatggggaaatcacctccggcccggttctttccggaggggttgctcctgtaaaagaacaccatacctgacagcctcctccagatcctcattttcaaggctctccgtgccccggtctgcggaaaagccctgtttaaggcgcaataagaacagcgcgaacattttcccgcccgcccagaaccatgctcccgcacttccttcgccggaataagcttatttaccgccctcgcagggtttccgcatgacggcagcccagacggaggcattatcctgctggggctccagcatatccttcacctgttccataatgatccccaccagctccctgctggaacaatccctggccttttgaagagccaggaaagaaggttctctcaacagctcgctccaaacctgcaagccgtccgagcatgccagcaccgcatctcccggatgcaggagcaggggcatggcgctgatgtccaccagttccatgggaccgcccataacggcggaacggagaatgcaacgctgccgaagcgcaccctgaagtgacattttccccttccggtaaaggcaatccgcaatcggtctcatggaatggtcttcattcagacggtccatgcgaaagctgtccgctccgctccataaatacaggggggagtctcccacgctgatccaccacaggaaatggtcgcggatgaagacggccagcaatgtggttccggattcctccggttccttctgaatggcggccaacgccctgttggcagcatgcaaagccgccgttaaacgttccgggatatcctcgatgccgctttccgcaaataccacggcaaattcctgcgccaccacacaggaggcgcaatctccgcgaagatgccctcccatgccgtcgcacacgatgcctagcatcccgccagcggcgggaagacttttaaccacgtcttcctgctcgcggcgtttgccgatccattgggcggaagcgcagtccagaatatccggggtgcggggagccatgcggccggtggttcggattaactgtccttacgttttaactgcgggaagagcagcacgtcacggatggaagaagcccccgtcagcatcatgacgacgcggtcgatgccgatgccgatgccgcctgcggagggcattccgtattccagcgtttcaatgaaatcatagtccacgcgctgggtctccccggcagcctggtgctccaggcgttccttttgcacgtcaggatcgttcaattccgaatagccgggggaaatttcctgcccgttgatcaccagttcatatacatccactacgtccggattttcccggttcagcttggccaggggaaccaggtccttggccacgtgggtaacaaagcaggggttcatggtcttttcctccaccagtttttcatacacctgctgggaaacatccacatctttcatatccgggctgatttccactcccagctcttcacagcgggcgcggcgcgcttcgggggaaatgtcaaaccagtcttcccccgccacgccccggatcaggtcctggtagtcggcgcgtttccagggacggctgaggtcgattgtgtaaagaacgttgccttcagcgtccttgtggtcaatctgaaggccgccgcagaatttttccgccagatggcagatgagctcctccaccatattcgccatggtttcaaaatcaccgcaggcgcaataggcttccagcatggtgaattccgggttgtggcggcggtcaattccttcattgcggaagctgcggttgagttcgaaaattttcgtgaagccgcccaccatcaggcgtttgaggaaaagctccggggcaatgcgcagcgtcagcggcatatcaagcgcgttatggtacgtttcaaacggcttggcggcggccccaccggccacatcctgaagcatgggggtttccacttccagataaccgcgttcctggagaaagcggcggatttccgcaatcatgagggagcgcgtaacgaacagggaggcgctttcctcattggaaatgaggtccaggtggcgcttgcggtaggtcacctccttgtccgccagtccgtgccacttgtccggcagggggcggaggcttttggaaagaatggtcagtccggatacctttacggtaggttctccggtacgggtcaggaacgtggttcccctgataccgacccagtccccgcggtccaggagcttccaaagcttccaggtggtttcatccacctcatttttatgcaggaacccctggatttttccccgtacgtccccaatgacgaaaaactgggatttgcccatgtcgcgaatagccagaaggcggcttgcgacggctacctgtttgtcttcctggaaatcggctttcaatccggcgggagtggtggtcacgtcaaatcttgcgccgtaagggtcaattcccagctcacggattttggcgagcttgtcgcggcgcacggcaataagttcggattccgtcgtggtcggatgtgcctgctgttgttcggacatagtgcggggattctaaaggcttgcttccgttttggctagcgcattgtcaggcagaggggacatttttggcggccggttttgacccgaaggttccttccccccctttttcggaagccggatgccggaacattccccagtactccggccgttttgcaaaaagcttggacagaaccacataaagcacgatatccaaaggaattgaaacaaaactggtcttattattaaaaaatggcaagcaaagccccacatacgcataattgcttttacctttggcaccagacatgttataaatgttcccgttaagacgcaccttatttatcaattatatactatccgtgcagacttatgagtgatcagacaaccgtaacttacagcacgattgacgctaacgaagccgtagcctccgtagcctatcgtttttctgaagtcattgccatttaccccattacaccatcttctccgatgggtgaatcagctgaaagctgggctgctgtcaacaggaagaacctgtggggcaccgttccctccgtggtggaaatgcagagtgaaggcggcgcggcaggcaccgttcacggcgccctccagaccggagcgcttgcaactacgttcaccgcatcccaggggctcctgctgatgattccgaacatgttcaaaatcgcaggggaactgactcccgccgtgttccacgtagccgcccggtccctggcttaccaggccctttccatttttggcgaccacagcgacgtgatgagcgcccgctcctgcggatgggccatgctgtgcggctcctccactcaggaagctgcggacttcgccgctatttcccacgccgctacactggaatcccgcattcctttcatcaatttctttgacgggttccgcacgtcccacgaaatcggcaagattgcagacatcacggacgataccctgaacggcatgattaagcaggaatggctggattccttccgggaacgagccctgacccctgatgctcccgttctgcgcggcactgcccagaacccggacgtttacttccagggacgtgaaacggtcaaccgtttctatgaagccactccggctattgtccagaacgccatggacaaattcgcggaacttaccggccgttcctaccatctggtggattacaccggcgctccggacgccgaacgcgtcattatcctgatgggatccggcgctgaagctgtggaagaaacggtagaagccatgatgacccgggaaaacgccaaggtaggcgtgctgaaggtgcgcctgttccgcccattccccgccgccgaactcgtcaaggccctccccgctacggtcaggaagatcgccgtgctggaccgcaccaaggaacccggctcccagggagaaccgctccaccaggacatcatccaggctctcttcgacgcccaggccaacggcacgctgcccttcaccaacggcatgcccaaggtggtaggcggacgctacggcctctcctccaaggaattcacccccgccatggtcaagggcgtctatgacaacctggctctggacactcccaagaatcatttcaccatcggcatcaacgacgacgtactgggcaccagcctcccgtatgatgaagattattccacggaagcggacgacgtgacgcgggccatgttcttcggcctcggttccgacggcaccgtaggcgccaataaggacgccatcaagatcatcggccagcatacgaacctgtatgtgcagggctacttcgtgtatgactccaagaaatcgggttcctccaccatttcccacctgcgcttcggtccccgtccgatcaaatccacatacctgatcaccaaggcaaacttcctggccctgcaccagccttccctgctggatctgttcgacttcctgaagaatgccgccaacggcgccactttcctgatgaacagcccgcacccggcggacaagctctgggacacgctgcccgcccgcatgcagcagcagattctggacaagaacatcaagctctacacgattgacgcttttgccgtggcccgcaaaacgggcatgggcggccgcatcaatatgatcatgcagacctgcttcttcaagctggccagcgtgattcccgcggatgaagccatcggctacatcaagaaggccattgccaaaacctacgccaagaagggccaggaagtggtggacaaaaacatcgccgccgtggacgccacgctggaaaacctgcaccaggtggacacaaccggaaaaactgtaaacggacacgccatcccgcccgccatgtccccggacgctccggactacgtacaaaacgtccttggcaagatgatgtgcggtgaaggcgacagcatcccggtcagccaaatgcccgtggacggcacattcccgaacggaacgtcccaatacgaaaagcgcaatctggccctggatctgccggaatgggatccgaccctctgcatccagtgcggcaagtgtaccgccgtctgcccgcacgcggttatccgcagcaaattcttctctcctgacgctcttgcaaatgccccggaagggtttgaatgcctggatgccaagcatccggactggaagggagagaaattcgtcatccagatttccccgaacgactgtacgggctgtacgctctgcgcggatgtctgcccggccaagagcaagacggacccgacgcacaaggccctgaccatggtcccggccgggaagattcacgacaaggaagaagccaattggaatttcttcctgagccttccggacgtggaccgtaccaaggtaagaacggacaacatccgctccatgcaggtgctgcgcccgctgttcgaattctccggcgcctgtgccggttgcggtgaaactccgtatgtaaaaatgctctcccagctcttcggcaaccgcctggtggtcgccaatgctacgggctgctcctccatttacggcggcaacctgcccaccaccccgtggtcccatgactctgaagggcgcggccccgcctgggccaactccctgtttgaagacaacgccgaattcggtcttggcttccgcgtctccctggacaagcagatggaacacgccattgagcttcttcatgaagctgccggcgccgtgggccaggaactggtggaccggatactggctaatccgcagaaggatgaagcagacatcgcccagcagcgtgaaaacattgaagaactcaagaagaaaatcgccggtaagccggaatacgcgcgcctcctgacccttgcggataaacttgtccgcaagagcgtgtggattctgggcggcgacggctgggcctacgacatcggctacggaggcctggaccacattctggccagcggccggaacgtgaaggtgctggtcatggatacggaagtatactccaacaccggcggccagtgctccaaatccaccccgcgcgccgcagtagccaaattcgccacgaccggcaagcccggcgtgaagaaggatctgggcctcatggccatgacttacggcaacgtgtacgtggcctccgtcgctctcggcgccaaggacgaacacacgctgaaagcctttgtggaagcggaagcctatgacggcccggctctcatcatcgcctactcccactgcatctcccacggcatcaatatggccaagggcctgcagcagcagaaggcatgggtggattccggccgagtcctgctttaccgctataatccggacctggctcgccagggcaagaatccgctgattgtggaaggcaagggcccgaagggcgatctgcgcgatgtgctgctcagcgaaaaccgcttcaaacttctggcgaagaccaataaggaaggattcgaaaaactccttgaagaagcccagaaggatgtctggcaccgctggaacctgtaccaaagcattgccggcatgggtgccgacaaacctgcggaataaggtataggccgcttaatttcaacgcccctgtccggcttatccggcaggggcgttttttactgccggatattcatgaaaaacaaaccatgaatatttcggggaggggactgcttttccgccccgccatacagccacgcaagcaggcttcccgcgccagtactttcccttcctgaaagccggagaattcatccttcccccgcagcacaaaaaagggcgcacaccttgctgcaaggccgggttttaatagatcaccttatacgggttaatttccgcatggaggttttgaaggccttcaatgaaccgcagcctttgcggccagccatgtccaaggcaaagaggggcatttcatgcggccaggggaatactgtttcctcacaccttcctccccagaggagcgcggcccgctttcctgcggaccgcgccggtggaaaaaccggaaaaaggctttaaaacagggatgctgcttcaagattcccgaaaatggtgcacaccggaggaggaatataccattccggatgccgtatccgggaagtgcaccacatcaggcgtcaggcgagtgcccacatccagatagaccagcttctccgtagcggatccgttgcggataacatgcgctccctccgggctggcagggaatgcaatcgcatccccctcttttaaattcttttcaccctcaggcgtacgcacaacggcatggcccctgatgatgtaaaatacctcttcattcacttcatgataatggtagccataggcgtaccgccccggctccacttccacgaaactggccgcacattttccggcatccgcttcccggatgacgggctttaccgcaaaggaattaccctcccggctgataacctgaggctccgtctccctgtaattggcaatgatgatcttgttcatggcattatctgttcatgcttgccgtaacggcaggcacttattaaaataggcggcaacattctttttgtaaagtaggcagaaaatagtaccctggattcctgaaagaaactattgcttaaaataaatgacttactataattcatcatgccctgttgaaactactctccaactgatttcctcccgctggaaagtgctcatcctccgcgatctgctcgaaggcacccggcggtttggagaactccgcaaatccattgggcctgtgacgcagaaagttctgactgcgaacctgcgttctatggaaaaggacggcctgcttacgcgaaaggtgtatgcggaagtacctccgcgcgtggaatatactcttacggaactggggcgcagtctgcgccccgtcctggcctccatggcggaatggggatcgaaataccaaagagaaaaccgctgatcctcccccctttccggagcttaaccgaacctccggaaagacatggaaatacagcagtttccctttttcccgcaagaaaggtcagcgggaaatttccgtcgttttacggataatttcgcgggctttccgcacgtcttcctcatgggaatccccgcggcttttttccacggtaaagagcttggaaagctcttcatccatgcgggctacggcagctttcgccttaggattttttgcggcgcgggcgcgcaggatattgaccttttcaaattcctccagtccgtcccggagtttttcaaaccgcagggaactgagattgccgggataaacaaggtagcagtctcccgcgggccagttcccgaaatcggtcttttcaaacggattacggttccaggaattataagcccatctcaaaaagccgtccaaatgattggcggcggcaaagaggggaagccattccgcctccgccagcggggaaatagtgaaggtgttgggctttttgggatggacacagacatagaacgtcgtcttttttccctcctttttacgctgcgccagcagatcgcccgtgaccgtgcctgcatggtcaattacaggagagacgtcataaacgtcccgggtcatggccgtaggccgattgacggcggaaacgattttgaattccggggcatacttgtccagcacattcttggccgccctgaccatagcgtccggccgttcatccagcccgatgcaggttttgcccagccagcccttgctcttgacgtgcttgcgaaaatccgtcaggaaaggcccccagatagcttcataggagggatcgttcggcttaagatccagaaatttgtactttccggtcgcctcatccagataacggattttcatgttccagggaatcatggtatagcaggatatctgccccttgacgcccacctcgttcatcatgaaggaaacccacttgtcaaaattggcgtaattccagcgcatggttccgtttttgcccttgacccattcaatcatgggcgggaaccagtcataagtctgggcattccaggcttcatcaatcagggagcatgtaatggccttttgcccggcatccgccagccttttcatcaccggcttcatcagtgcgaaatgctccggagaccacggttccacatcatgccagcgggccacggcctgcggatgctgccacaagtccagatgaacttgccaatgcgcgggagcagggagggattccggcgccacctccagaattaccggcacactgacgggagagccgctttctgcggaaactaccacttttcctttgtacacgccgggtttggcagacggggggatattgacctccacccataccggacgcacgcctccggcttgcaaatcgcagctgttttcgctgccgatgatatctgaaatcagcctgttgccccccctggtgtagcgtatcatggcagtccggacagggataatctgtccggcagcgttttttaccccggcgcaggaggccgataactggggctgcgcctgggaagaccagacggcaatctgcccgccagcgcgttcgcctctccagccggacagacgcacggcatcctgaagcatttcctgcccgggagcgccattgtaaggaatacggtcataatccttcaccgctgcagcctgcaggctcagagcggcatcgggtccgtaccctttgatttccaccagatgcccccccttctcattgtaagcgctattgcccaaaaaagtgattttaacgtaacggaccgtctgcggattgaatttgaagggaactccttccggagtggcggcaatgctgttggaagactgatccgccaacattttccagttctttccgtcttcggaaccttctattttatatttgtaaatgcgtcctccttcccaatagggccatacatgcagggaggaaagcgtccggggctttcccatatctatttggagccagacgggaatgccctcgcaaccccagtatttgccggcgttattcgtctgcccgtccacggccagttccggacggtcactgccgtaatgaccggaaacggttactttggctccggcaaataaattacctgcatcacccggagttcctacggaaagaagggcgggttcatacaggggatgcctctccagggactgggcctggacaaaagacgttaaggcaatagcggaacacagaggaaaaaaaagacagcgcatacgcatattacgcaccggaatttcattttctctcaaaagaaaagctgtttccgctattccgccaaaggacgtacgggtattcctctggaagcaaagtaagccttggcttccggtaccgtgtattccccgaaatggaaaatggaagccgccagcacggcatccgccttcccttccatcagcacgtccaccatgtgatccaaattacccgcacccccgctggcgattaccggaatgcgcaccgcactgcttacggcgcgggtcaattcaatatcataacccattttggctccgtccgcatccatgctggtcaacaagatttccccggctccgcggcgttccgcctccacagcccattccacggcatccagccccacgaatttccggcctccatgggtggaaacgccccacttgccggaagcctggcgcttggcgtcaatagcgacgacgatgcactggctgccaaaagccgccgcaccttcattaatcagctccggcctattgatggccgccgtattcagggaaaccttgtccgcacccgccagaagcatttcgcgcatgtcctttacggaacggatgccgccgcctaccgtcagcggcatgaagcagcatgccgccgtgcggcgcaccacgtccgccatggtggcacggccatcggaagaagcggtaatatccagaaaaacaagttcatccgcctgctgggcatcatacgccctggcacattctacaggatccccggcatctctcagattaatgaaattggtccccttgacgaccctgccgtccgttacgtccagacacggaatgattcttttagccagcacggccctatcaagccatcaccgccgccaaaggaaaagcctaaaatacggcttgccgcgggatgccttttgataaacatgttccctttttgaccaaggccctcttcggcagcgtttccatcccgcatatccacggtaagagaaatttactgaaattcatcaatatcactattccactcactttccagcaagccctgccccgccatgaagaaacgcagtgcggcatctgcccctttcccgcccgcatgcataaaacggcctaagagcttttctttccatatccaggtggtagagtccgcataaggcatttccattcatgaccactacacgctcgggattcaccaaacttgcagccgtctgcattgccattcttctgggggcggtggtctgggagctgggctggcccctgacgcgggcggaacatgagtggtcgcggctgattgcagccgttgccacgctgggccacctgacgggcattctgggttcctatttccggaaggaaatcaaccgcccttccctgaggctcctgattttccaaatcatcagctgcctcatgatttttctcctgattgccagggaacaacaggaagcgggatacatgaggttcacggagctttcccgcctggtgattacggccgggctgattgccatccccacgctgatgtccctgaccaggatttttgaatggctggtgggcaagcaaaaaaaaggccggcctcttatggcccccgccatgcagtttgtagcttctctgggagtagtcatcctggcaggcaccggattgcttctgctgcctaattccacatatccgggtattacactcagttttacggatgccctgttcaccagcaccagcgcagtatgcgtcaccggtctgaacgccgtggattttgcccatacttttaccccgctgggagaaatgttcacgcttgcccttatccagattggcggattcggcatcatgacgttcgcttacttcgtagccatggtggcaggccagggtttttccctgagggaccgcgtgctgctgacggatctgcttgatgaagacaatctgggagccgtcgtctcctttattaccactattgtggtcagtacgctgttcatcgaactgtgcggcgccgtccttctttatttctcctgggaagggaaggacatcaacctgatgggggagcctttgtggtggcattccctgttccactccgtttccgccttctgcaatgctggtttttcaactttcccgatgaatttgatggagccgggcatccgcctgtgctacagcgggcaggcggtcatcatggcgctgatcgtatgcggcggcctaggattcggcatttacaaggaaatcaattcgcgcctggcaaaccgctttttttccaaacaccgccgcctgcacatgcagtggaccccttatttcaaactggtgatgatctccacggggattttgctggcgggaggcgccctggccatctttgccgtttcctctccccatgctgcggaaccgttgggggaacacctctggatttgccttttcgacagcgtcacggcacgcacggcgggattcaatatcagcgactacggccgctatctgcccgcagccagcctcattatgtgcggtctgatgatggtgggaggcagccccggcggcacggcaggcggcatgagaaccactacctgcgccattgcaggcgcggaaatcctgcgcatcctccgcggcagggatcatgtggaattcttccgccgccgcatcgaccagcgcaccgtggcgcgctgcgtgattaccgtggtggtctcctgcgcctggatcggctgctttaccgtcctgatttgcgccctggagccctccatgagctctctggatatcttctttgaaaactgcagcgcttttgctacggtaggcgtgtcgcggggcattactccagatttaagcggcccttccaaataccttcttatcgtcaacatgctcgcttaccgcgtggggctcttcgcttttctcattgcgctggcaagcacccctactccgaggcattaccgctatccatccgtcaaaatcccgttaacctgaatataccattatgagatacaccgttatcggcctgggccagtttggacaggaactctgcacagaactttccgcccgtaatattgaagtagtagccgttgcctccacggatgaagaattggaacaaatcaaggatctggtgacttatgccgtggtgacggattacactaatccggccgctttgcgtgagttggaactggacgaccagtccgccgtcattgtcgccatcggagacagttttgaagaaaaccttctcgtcgtcacgcaccttcagaaaatgggcgtccgctacatctacgcccgcgtcatgagtccggtgcacgaacacattttaagccagatgaacgtgtatgcgctcatcaacttgtcccgcgtggcttccaagcaactcgccagccagttggaatccccggaattcctgcgcgtttcccccatggacgaaaaccacagcatcgtggaaatagccgtgccgcgcatctgggtgggcaagcgcctgcgggatgtgggcctgcgcacggaacaccacctcaacctgctcaccatccgccgcggggaggcccagactccgcaggggcgccgggaaatcctgtccataccgcgcattcccgtcattggcaccccttccccggatctcgtttttgaagaccacgacattctggtcctgttcggcaaagaaaccaatttgattgaattcgcccaattatccaaaggattgtaaaccatcctccgcgagcaggctgagggtatccctctccatttcagaaaaaggcgccggataagccgcctgtgcaaacagcctccgtcctggttttactggcttgacaatgcctcaaaagaagccaccagacgtttttcggagacgcggcccttgacggagatggcgggagcgaaaacggccaggcggtattcttccagcaaataaccgtattgcatccagcgcaggtctccggcatgttccttcaaaacctgatgccagggaaaatacacgcgttcaaagaggtccaggcgttccaattccctggcaaggggttgctggccgatgcgtctgatacgctccgcaattccctgcatgtaccgtttcaggtccgacaagcgttccgctccatgcgcccacaggaaacgggggcgtaacaaccagtcaagctggcgctgaaggtcagccgtgatgcgctccgtatggcgcacacccttttgcagcgccgtaaagtccctgacggcatgttccgtacccgccaccagttcccatatatccgccacgttatgcgctgcgtcaaaaaggttttggcgcagattcatttccgcagcagcgaattgctccgccgtgcgcggcaaaggacggcccatggctatctccgcggcaacgtccaccaggtcttccgcattggtagacggctcccgtccgagcatatgaagagagagctttccttccagcttcaacggaaattttctgcggagatggttaagctggtccgtctggcgcaggcgcatgaaacgcaggcacccttcacggtgggattccgcagcgctcagttcatcctcaaagacacggacgcccacggatgctccttcatccaccagagccacataacccggccttcccgccacatccaccgtgtattccaaatctccgcagctccattccttcatgccggttacggacacgatatcctccgctgtttcctggaaccggcgggaaagttttttacccaggcggttattcagttccgcaacatccgtgcccatggcaagctcttccccttcatcatcacacacccatattttcgtaaccagctccgcaggaagacggttcatgtcaaaaaaggagggcgcgcaaaattttcccgtttccacttccacaaatcccgccagtttccccgccagcggcccgtccggttccaggccatgcctcagttccgcaaagtaagcggccttttggctgataggctggagaaagacgcgcaaatccttgggaagggaacgcagcaggcattccgcccgctgggccagatggccgggaaccccccactccggcaaccattcgggaatatccggcaactggtcgatgtggacgcccagggtcacgccgtcatcttccgcgccgggatcattctggtaatacacggcatattccgctcctttacaggtgatttcatccggaaaaccatccagcaggtctttcccccagaattcgtacatggcttcctgtggcggaacatgcagagcttccgggtttttcttctccacaccggcggcccaccgcaaaaaagccctggccgtacagcagtccgggggaacaagcctgttaaagaattcaaaaactccttcctcacaccagacctggtccggacggcgcaacttcagctctatctgccgaacctcttcccggagcgtttccagatacctgatacaggcgggtttcgtgcggaaaccaccgcccaacagaccttcacgtatcattatttcccgcgcatgggcgggattgatacggccatagtgcacacgcctgttattaataatgcgcaaaccgccgcacacgacgcgttccactgcgtaaacagccccctgctccctgtcccaccgcgctccggaatagtgtgattcgcacagatggggcgctacccgctccacccattccggttccaaaatggaggcgcggcgcatccacaggcgcgtggtgtccaccaactccacgcccattacccattcactcctttttttacggcggaacaggccggaaccgggaaaaatgccgaaggaacgtcctccggcgccgcgatattcccggttgtctgcatcccagaggccgaattggcgcggaacgcccgccaggatgctccggtgaatcatggcaaaggaagcctgccgctccgtttcttcttccaaaggggaaattctgcatttcaatgtttccctgaccagccgggaaaggtcctcccataaattgaaccattccatcatgcggttgaaattgaggaaatttttcccgcaccatttccgaagctggtttttacgccagcgccttccctcccggaattgccatgcagccttccataatttgagcagagacaggaagtcactttcttcttccttccactgcgcgtgggcctggtccgctttctgagcggcatccgcagggcgttcacggggatccatgatgcccaggctggctacaatcaccagcatttccggcagggcctgttcatgttgtgcctccagcagcatacgggccagccgcgggtcaatgggcaaccgcgccagctttctgcctacgggcgtgagctgccgagctttgtccagagcgccgatctcccgtaaggtgcggtaaccttccgtcaccagtttggatgaaggaggatccggaagtgggaactccggcatttccggcaatcccaggtctttcatccggagcagcgccccggccagtgcgctgcgcctgatttccgggtccgtaaagtccggcctgtcctcccagtccttctcactgtacaggcggatgcacacaccttcgcacacacggccgcaacggccggcgcgctggcgggcgctggccttggagacaggttctatctgaagccgctgcacttggcgtgccgggctatagcggctgacgcgcgccaggccggagtcgataacataaatgatgccggggattgtcagggacgtttccgccacatttgtagccagcacgatgcggcggtatccctgctccggatgaaaaatcctttgctggtccgccaggcccagcctggcgaacaaaggcagaatgcgcgtgtttctcagattccggccttccagtttttccgccacctcacgtatttcgcgttctccggggaggaagacaagcacatccccgcggtcgtccagagtatccagccaatccacggcacgcgccacatgagccggaagttcctcatcgtcatgcagcggcggcagatagtggaagtccaccggataagtgcggccttctacctgaattataggtgcgcctccaaagaattcggaaaacccgccggcatccagcgtcgcggaactgatgaccagccgcaagtctctccgcctgtccagcaaaagccgcagatagccgagcagaaagtcaatgttgaggctgcgttcatgcgcctcatccaaaatcagggtatgatattggcgcagatccggatcatgctgcgtttccgccagaagaatcccatccgtcatgaacttcaggcgcgtatccggcccggctttttcctcaaagcgcacctggtaacccaccaaacctcccaggtcgcagttcaattcctccgccactcggcgggaaacggaagcagcagccagccttctgggctgggtgcaccctactctgccccgcacctccccggcaagctccatggccattttagggagctgggtagtcttaccggatcccgtctcccccactacgacaatgacctggtgctcccgcattgccgccagaatgtcattccggcggcgggaaatgggtagatccggataagtaatgttcatggtgaagatgagaaaaaaaccctgcaagaacgtcctgcagggttgaagaagaaaaccgggaagttcttttactgacggggtttgggaagggcgatacggccgctccgggtcagcatctgcacatcataatcctcaatgagggacaggaaacggtctatcttgtactcgcctcccgtcacttcaatggtcagggcgtcccgcgtgacgtccacaatgtgggcgcccagtatctggcagaactcaatgacttcatgccgcgtggcggaatctacgccaatgcgggtcaataccgtttcccggtacacattgtccgtattgcggaaatctactacttccaccgtgttgaccagtttttccagatgcttgataatctggtccagaacatcctccttttcgcgtacgacgatggtcatccgtgaaaagcgcgggtcctggctaggggcaacgttcaacgaatgaatattgtagccccgtccactaaacaaaccggcgatgcgggcaagcacgccaaatttgttttcaacaagtacggagatagtatgacgagtcataatttaatttcttaaaggtgatgcattgtaagcacttttgactgccagtcaagcctgcggacggcgatgccggaaaacgtttttcctaacggaggttccggcaggaaccgctcaggccggatcaaagctcgtgcggtatgatggcgttgccttttgtcgcctccgggatgcggggaagcaatgttttttcagaaacggggcgcgcatccactttcacattaaattgctgcccgtcgcgggaaacggtcagcaatgcagccccttccctaagagctttgaccaaggcttccttggtgctgacactctggtggtttacggcaaataccatgtcgccggcctgcaatatctgccccacggatttcttcggattcacttgaatgaccagcaacccccgagcacctatggattgttcttccgcagtcagttcacgcaaatgcattcccactccttccatgaagtcttcccaaggagaaggaacattttttaaaatactatctcccaccttcagggtgacgttcattttttgccctttgcgccagactttcagccggaacttgtcgccgatggaaagattttcaatgcgttccttcacttcctcatccgtctggatggggacttcgttgaaactcagtattacgtcacctgtttgaaggcctgcctgctccgccggggaaccatgcttcacgatgttgattactgcgcctcccgcctcatgataatccaggaagctgcgaagcgggggagtattgcgcacaatgtccaatcccagataccctttcatggggcggccatgtttgcaaatctgctcaaagctgtgcatcaccagattggagggaatggcaaacccaatgcaagcgtaatttttctccgcattgggaagcaccgatttattgatgccgatgatttccccgcggatgttgatgagggggcctcccgaattccccgggaagatactggcatccgtctggatcaagttaatgccggaatccaccagcttgcgttcacgggcactgataatgccgcgggaaacagttgtgcccagcccatagggattgccgcatgccagaacaatcatgccgggcgcaatttcatcactgttgccgaacggaaggggagtaaacgtcatcgggttttctacctgcagcacggcaatatccagttccggatccacccctaccaggcgtacggaaacgcttttcccattgctcagcgtaacgcgcagcgcatgcttgttctgaatgacatggtaggcggtaataatatgcccttcttcagtaacaatgacgccggaacccaaaccatgaaccgtcagcctcttttcaatcatgaaatcaccatcctcggaaggctgaggaacgcttgtcacgcctgtagtgtctatgctgaccaatacccgttccaccagccgggcaacgcgtgaatattcctcattgagctggtgcaaaacaggaatatcctcctccttcaattcgggctgctgggccagggtaaacacttccgaccggaaggaaacattcttctccgtaacacgactgttccatctccaataggcaacggagaccacggtcatcataaccgtcatcatgatgacaagtaaagcccgtgtccatatggtcgatctcatggaaatgccctgccgtaataacgatcaaacggtttgcggcttgatcacaaggaaatgcctgaaaacggagcctgtcaagcttcagccgctttttgacattccggttccattgatactatttaagtactttctcttcaaatgaaaaaactttcaaatgacaaatacgcctttcaacaaggcgtactttatgatatcatgcggctacggttttatgggttccagcactttacaacaacaggccattcatctcgtcttcggtacggatgaaggaatggtgcgtgaaaaggcttccggcatctttgccgctctgacggaaggcacaaacgatttttcccatgaaattctggaagcggcctgcggtgattccgatgaagcggcccagctggtacgccaggttatggaagctctgcggaccctcccgttttttccggggcgcaaagtagtatggatgaagaactgcaattttctgggagactccgtcacggggcgttcctccaccacggaagcggctctggattctttcaggcaattgctggaaagcggcctggggccggacgtcctgctgcttatttccgcctccgaatttgacaaacgccgttcctttaacaaattcctgcttcaatacgccgcatcggaagaattgaacaagccggacatcacgaaagcaggctgggaaggcagtttaatgcccctcattaataaggaaacggcggcgcggggcatgaatttcgactccgccgccctggaactgttcattcaccgcgtcagcgaatcctcccgccaaatcatttctgaaattgaaaaactggatctttatctgggagcggacagacgcaccgtaatgccggaggatgtggagcgcatggttccgctgacgcgtacaggcgttatttttgaaatttcccgggctttggaaaacaagaaaagcgatgcggccatctctttgattgactttcaactggaacgcggtgaaaacgccatcacaatcatgcgtgccgcattcatccctacgttaagaaatttgctggctgccagacttttatgtgacgcattcaacctgaagcccaccaatttcaaggaatttacggcccgcatttcttccctgccctcctatgcggccgcgttaattcccttgaaaaaagacggtacacccaatgcgtatccgctttttctggcggcgcagaatgcttccaaattcaagacggaacggctgaagcaaactttgaaagaatgcatgaaggcggataaagccctggtgtcctcctctcttgatccccgcctgattctgcatcgtcttgctatctgctccgcatcctgatgaactcctcctcttcttccgtttttcccctgtttgacgttctcgtcgtcggcgccgggcacgcaggcattgaggcggcactggcagcatcccgtctggggtgttccgtcgccgtcctaactcataacctggatactatcggacaaatgtcctgcaatccggctattgggggacttgccaaagggcatatcgtccgggaaatagatgccatggggggcgcgatggggttgaacacggatgctaccgctattcaattccggatgctgaacgcttccaaggggcccagcgtgcgcgctccccgcgcccagtgcgataaaacagcctaccgcacaagaatgaaaatggttctggaaaccacccccggcatacgcctgtttcagggagatgtggtcaaactgctcgtcaatggagaacagcaggcaacgggagccgttacttctctgggctgcgccatccatgcccgcagcgtgattatctgctccgggacattcatgaagggattgcttcatgtgggccttcaacacataacaggaggccgaatgggttgcgcttcttccagcctttccgccgatcttgccatgctgggttttcaggtggaaaggcttaaaacaggaacttctccccgcgtcaatggaagatccatcgacttttccgtctgcgaaatacagcccggagacactccggaagccctgttcagctaccgttcccgtgatatactgaaacgtgattccgaacccttttgcactttgaacacgtggggagatgaaaatttccggatgaagcaaatgccgtgctggatcacctacaccaaccagactacgcacgacattatccggaagaacttaaaattcagccccctttacagcggtatcattgaaggcgtaggcccccggtattgtccttccatagaagataaaatcgtgcgctttgcggaaaaaaacagccatcaggtattcctggaaccggaaggccgcagtacggaggaattctaccttaacggagtttctacttcactgccctactccgctcagtgcgacttcatccataccattcccggcctggaaaacgcgcagctgatccgtccgggatatgcagtggaatacgacttctgtcctcccacgcaattgcatcctacgctggaaacaaaactggtagaaaacctgtactttgcaggtcaaatcaacggcacttccggctatgaagaagccgcagcgcaaggactaatggcgggagcgaacgccgctctgaaaaccctgggcaaaccttctctggtgctgcgccgggatcaggcttacatcggcgtcatgatagacgacctcgttaccaaaggaaccgatgaaccttaccgcatgtttaccagccgggcagaattccgcctgttgctgcgtcaggataatgcagacctgcggttggcccctctggcttttgaagcgggccttattacctgtgaaatggcccggaaggctgaagacaggaaaaacgccgttgaagaaggaataataaaagctgccgcgcttaaacatgaaggagtttctctctccacatggcttaaaaggcccggcaatgactggactctattgcctgaagaactgaaaaaaatgttccacgtggaacatttggatgccattgctacggatatccaatacgaagggcatattgaaaggcagaaaaaacaggcggaaaaaatcatacggatggaaaataaaactattccctccgatattgattacgaacatgtccatgccttaaaaaaagaggctgtcatcaagctgggcaacatacgtcctgcaactatcgggcaggcctcccgcattcccggaattaccccggcagatatcgccctgttgcttgtgcatctgcaaaaacgcagcaggcaacaaacataataccccgcgttttttattcagaaatttcaatttaaggaggaccgtaggaagcgggtattgaaaaaataaatatgtaggaatgtccttgagccgtatctgatcccattatatttccctgtcgctattgcctggagtcgataaaaagattcaatcctgttttctgaatgtctttttgcgcgacagcagctcttcccttccttcgaacaaccaccactttctgcttgtcgtaaaaagaaatggaatatcccttcagtattattgaataccggccttcctgatttatccattgaaaatcattaagaagcatcgcccggtcttttcacggattccattcaaatactgccgataagaaaaaacggcattaagcttactccaaggggcaagggaggccggaagggctgaatgacaaatccaccgggctaatgaaaattaccttcccaagtttaaaattcttcggataaccaataaacaaagacctcatccattaccggtaacagatatctccccggatacatacatcatctccaaaaatatttacaacaggttgttcaagatgggcttcatgctccagaaacggaccgggcgctacgccgtccgcaccgccgccgataatgatgggagcataaaaccccacccactcgtcgactaaaccggctttcagaaattcccggaccagacagcctcccgcttccagcaggatagttcctatttttttatcattatataatttttttaataattccaaataactaaaaacattctccacaaccaaagtacggtcacgaaattcatctgttaaacaaatggaatccgcaggtatggaagaggcatcatgggttagaataatacgccagggttgttccttaaggggagaaacaggacgatccggtttcctaatggtcagggacggattgtccagacgcacggtattccctccggtaagaaccgcatcacattcggcacgcagggtatgtacaaaagatctggatttttcattcgtcagccattgggaacgttccggactacgggaaatgcggccatccagagacatggcgctttttgcaattacccagggacgcccttccagcatgttcaccctgaaccccctgattaaatgatcgcattccttctccagaaccccgcgggtaaccttgatgccggcctgttcaagaatatcagcagcagcaccgcggtgtttgggattaggatcttccgaaccataaaccacccgtttgaaacgatatttcaaaatggcatccgtacaaggcggtgttttcccggaagtactgcatggttccagagtaacatacaaagttgagtccgcgaacaggggggcattgccattcgccactccgtcggcaatggcctctctttccgcatgaggcaagcaagcttttttatgaaatcccgaaccgatcacctggttttcatgcacaatgactgcccccacgcagggattcggactcgtaagtccgattccatttgaggccagttttatggccatgttcatccaacagtcatcctgatttttcgtattcacgccgttttgtagcatgaaaaccggaagaaggacaatcacgttgtgtgattgaagaatattaggtttaacaatattaaattccttcttcttctgctgtgtgtctagtgtgaataagatttcaaatggctgtaaatgagagtattgaacatcatttcaaatgttaataaatttggcccgcaagcctgtgaataatatctgaataagttattcacatcatactcacagttaatcaacctggcctttcacaaggttattggcaggtgcggctgtaaacagaaacggcattcctgcttgcagaaaacccggaggaaagcataccatccttttgtgaaggctgccagattgatttacattccggagagggatcatacttttcccgctacaagccctgaaaggcccttctacggcttttccgtggctggaatgaatatagccgcttactgtgcttcccgccttcgggaagtgggctttgaagcggtttttgacccgggaacgccggtttcagaagaaaaaggggaaatcatagaagtgtccatgcatgatttttccccggaggcggccatatggcttgccttttgcggggcaggggaagcaaggagtgaagaagggcatttgctggcccggaaaagcggggaaaacgggttgacgcgggtattcacgcggaaggaagcagcgatagagcgcctcgtttatccttgggatcttctggaatggcaggaaagagtgatggagaagatggagtgggaggatttctctggaagggaaggggtttatgtcatgggaacgctccgggtaggggaaggaaccgtcatcatgcccggcgtggttgtagagggagccgtgtgggcgggtgatggctgccgcatagggcctaattgctatttaaggggttgtgtatctttggggaatggctgtgtagtagggcagggagtggagctgaaaaattgtatcatcggcgacggcacatttattcctcatttgagttatgcgggggattccattattggcagtgacgttaatttcggcgccggaacggtatgttccaattttcgccatgatggcggcgaacacagaatggtggcgggaggaaagctggaatttactggaagaaacaagcttggcgccgtcattggagaccatgttcggctgggtgccaataccgtcgttttgccggggcgggttcttcctcccggtgcttggaccagaccgggggaagtcttcacgggggcatgaatcgggtaaaggaattctcttaatactgaaaaggccgcatgcggaaaaacgtcttcccgcatgcagcctttggcgaatggttaaagttgcttcagcagcaccggcggcggcgcatcatcagggcagccagccccaacaggcccagggaagctgtggctgcttccggcacaggaagcacaacgccgtcataaaatttgatgttgttgatatccatagtgccgttcatggggcgggtatttccaaaagaagctccaaactgggagcctgtcagggcgggggaggatggattccactcggtaatcgtacctgccagagcgccgttgacatacacggaaagcgtttgggaggaaagatcggaaacgatgctcagattagtccagctgtcctgctggagatccgtccaggt

(The sequence listing continues in the following parts.)
